United States Patent Application Publication US 2025/0121052 A1 - sequence listing, part 3

SEQ ID NO: 18565 - protein, 10 aa, Severe acute respiratory syndrome coronavirus 2
  REGION 1..10: note = Table B: HLA-DQA1*01:02-B1*06:02L HLA-DPA1*01:02-B1*04:01L HLA-DQA1*01:03-B1*06:01L HLA-DQA1*02:01-B1*03:03L
NTFTRLQSLE

SEQ ID NO: 18566 - protein, 10 aa, Severe acute respiratory syndrome coronavirus 2
  REGION 1..10: note = Table B: HLA-DQA1*01:02-B1*06:02L HLA-DPA1*02:01-B1*13:01L HLA-DQA1*01:03-B1*06:01L
AFNVVNKGHF

SEQ ID NO: 18567 - protein, 14 aa, Severe acute respiratory syndrome coronavirus 2
  REGION 1..14: note = Table B: HLA-DQA1*01:02-B1*06:02L
VNKGHFDGQQGEVP

SEQ ID NO: 18568 - protein, 10 aa, Severe acute respiratory syndrome coronavirus 2
  REGION 1..10: note = Table B: HLA-DQA1*01:02-B1*06:02L HLA-DPA1*01:03-B1*03:01L HLA-DQA1*05:05-B1*03:19L HLA-DQA1*05:01-B1*02:01L HLA-DPA1*03:01-B1*105:01L HLA-DRB1*15:03L
PVSIINNTVY

SEQ ID NO: 18569 - protein, 12 aa, Severe acute respiratory syndrome coronavirus 2
  REGION 1..12: note = Table B: HLA-DQA1*01:02-B1*06:02L HLA-DPA1*01:03-B1*04:01L HLA-DPA1*01:03-B1*04:02L
GVDVELFENKTT

SEQ ID NO: 18570 - protein, 13 aa, Severe acute respiratory syndrome coronavirus 2
  REGION 1..13: note = Table B: HLA-DQA1*01:02-B1*06:02L HLA-DRB1*15:03L
VDVELFENKTTLP

SEQ ID NO: 18571 - protein, 11 aa, Severe acute respiratory syndrome coronavirus 2
  REGION 1..11: note = Table B: HLA-DQA1*01:02-B1*06:02L HLA-DQA1*05:05-B1*03:19L HLA-DPA1*01:03-B1*104:01L HLA-DRB1*15:03L
TTLPVNVAFEL

SEQ ID NO: 18572 - protein, 12 aa, Severe acute respiratory syndrome coronavirus 2
  REGION 1..12: note = Table B: HLA-DQA1*01:02-B1*06:02L
PVPEVKILNNLG

SEQ ID NO: 18573 - protein, 11 aa, Severe acute respiratory syndrome coronavirus 2
  REGION 1..11: note = Table B: HLA-DQA1*01:02-B1*06:02L
GVDIAANTVIW

SEQ ID NO: 18574 - protein, 10 aa, Severe acute respiratory syndrome coronavirus 2
  REGION 1..10: note = Table B: HLA-DQA1*01:02-B1*06:02L HLA-DQA1*03:01-B1*03:02L HLA-DQA1*05:05-B1*03:01L HLA-DQA1*01:03-B1*06:01L HLA-DQA1*02:01-B1*03:03L
AANTVIWDYK

SEQ ID NO: 18575 - protein, 11 aa, Severe acute respiratory syndrome coronavirus 2
  REGION 1..11: note = Table B: HLA-DQA1*01:02-B1*06:02L
RDAPAHISTIG

SEQ ID NO: 18576 - protein, 12 aa, Severe acute respiratory syndrome coronavirus 2
  REGION 1..12: note = Table B: HLA-DQA1*01:02-B1*06:02L HLA-DQA1*01:03-B1*06:01L
HISTIGVCSMTD

SEQ ID NO: 18577 - protein, 13 aa, Severe acute respiratory syndrome coronavirus 2
  REGION 1..13: note = Table B: HLA-DQA1*01:02-B1*06:02L HLA-DQA1*01:03-B1*06:01L
ISTIGVCSMTDIA

SEQ ID NO: 18578 - protein, 12 aa, Severe acute respiratory syndrome coronavirus 2
  REGION 1..12: note = Table B: HLA-DQA1*01:02-B1*06:02L HLA-DQA1*01:03-B1*06:01L
TIGVCSMTDIAK

SEQ ID NO: 18579 - protein, 13 aa, Severe acute respiratory syndrome coronavirus 2
  REGION 1..13: note = Table B: HLA-DQA1*01:02-B1*06:02L HLA-DQA1*01:03-B1*06:01L HLA-DQA1*02:01-B1*03:03L
IGVCSMTDIAKKP

SEQ ID NO: 18580 - protein, 14 aa, Severe acute respiratory syndrome coronavirus 2
  REGION 1..14: note = Table B: HLA-DQA1*01:02-B1*06:02L
GVCSMTDIAKKPTE

SEQ ID NO: 18581 - protein, 12 aa, Severe acute respiratory syndrome coronavirus 2
  REGION 1..12: note = Table B: HLA-DQA1*01:02-B1*06:02L HLA-DRB1*08:01L HLA-DQA1*05:05-B1*03:19L HLA-DQA1*05:05-B1*03:01L
SMTDIAKKPTET

SEQ ID NO: 18582 - protein, 10 aa, Severe acute respiratory syndrome coronavirus 2
  REGION 1..10: note = Table B: HLA-DQA1*01:02-B1*06:02L
ETICAPLTVF

SEQ ID NO: 18583 - protein, 13 aa, Severe acute respiratory syndrome coronavirus 2
  REGION 1..13: note = Table B: HLA-DQA1*01:02-B1*06:02L HLA-DQA1*01:03-B1*06:01L
FRNARNGVLITEG

SEQ ID NO: 18584 - protein, 13 aa, Severe acute respiratory syndrome coronavirus 2
  REGION 1..13: note = Table B: HLA-DQA1*01:02-B1*06:02L HLA-DQA1*03:01-B1*03:02L HLA-DQA1*02:01-B1*03:03L
NARNGVLITEGSV

SEQ ID NO: 18585 - protein, 12 aa, Severe acute respiratory syndrome coronavirus 2
  REGION 1..12: note = Table B: HLA-DQA1*01:02-B1*06:02L
RNGVLITEGSVK

SEQ ID NO: 18586 - protein, 11 aa, Severe acute respiratory syndrome coronavirus 2
  REGION 1..11: note = Table B: HLA-DQA1*01:02-B1*06:02L HLA-DPA1*03:01-B1*04:02L HLA-DRB1*14:01L HLA-DRB1*14:02L HLA-DQA1*05:05-B1*03:19L HLA-DQA1*05:01-B1*02:01L HLA-DQA1*05:05-B1*03:116L HLA-DPA1*03:01-B1*105:01L HLA-DPA1*01:02-B1*04:01L
VLITEGSVKGL

SEQ ID NO: 18587 - protein, 13 aa, Severe acute respiratory syndrome coronavirus 2
  REGION 1..13: note = Table B: HLA-DQA1*01:02-B1*06:02L HLA-DQA1*01:03-B1*06:01L
GLQPSVGPKQASL

SEQ ID NO: 18588 - protein, 13 aa, Severe acute respiratory syndrome coronavirus 2
  REGION 1..13: note = Table B: HLA-DQA1*01:02-B1*06:02L HLA-DQA1*05:05-B1*03:19L HLA-DQA1*05:05-B1*03:01L
LQPSVGPKQASLN

SEQ ID NO: 18589 - protein, 14 aa, Severe acute respiratory syndrome coronavirus 2
  REGION 1..14: note = Table B: HLA-DQA1*01:02-B1*06:02L HLA-DRB1*01:02L HLA-DQA1*05:05-B1*03:19L HLA-DQA1*05:05-B1*03:01L HLA-DQA1*01:03-B1*06:01L
GPKQASLNGVTLIG

SEQ ID NO: 18590 - protein, 13 aa, Severe acute respiratory syndrome coronavirus 2
  REGION 1..13: note = Table B: HLA-DQA1*01:02-B1*06:02L HLA-DQA1*01:03-B1*06:01L
QASLNGVTLIGEA

SEQ ID NO: 18591 - protein, 12 aa, Severe acute respiratory syndrome coronavirus 2
  REGION 1..12: note = Table B: HLA-DQA1*01:02-B1*06:02L HLA-DQA1*01:03-B1*06:01L
SLNGVTLIGEAV

SEQ ID NO: 18592 - protein, 11 aa, Severe acute respiratory syndrome coronavirus 2
  REGION 1..11: note = Table B: HLA-DQA1*01:02-B1*06:02L
IGEAVKTQFNY

SEQ ID NO: 18593 - protein, 13 aa, Severe acute respiratory syndrome coronavirus 2
  REGION 1..13: note = Table B: HLA-DQA1*01:02-B1*06:02L HLA-DRB1*16:01L
AVKTQFNYYKKVD

SEQ ID NO: 18594 - protein, 12 aa, Severe acute respiratory syndrome coronavirus 2
  REGION 1..12: note = Table B: HLA-DQA1*01:02-B1*06:02L HLA-DRB1*08:04L HLA-DRB1*14:01L HLA-DRB1*11:04L HLA-DRB1*11:01L HLA-DPA1*02:01-B1*13:01L HLA-DRB1*10:01L HLA-DRB1*08:03L HLA-DRB1*15:03L
NYYKKVDGVVQQ

SEQ ID NO: 18595 - protein, 13 aa, Severe acute respiratory syndrome coronavirus 2
  REGION 1..13: note = Table B: HLA-DQA1*01:02-B1*06:02L HLA-DQA1*01:03-B1*06:01L
YKKVDGVVQQLPE

SEQ ID NO: 18596 - protein, 13 aa, Severe acute respiratory syndrome coronavirus 2
  REGION 1..13: note = Table B: HLA-DQA1*01:02-B1*06:02L
KKVDGVVQQLPET

SEQ ID NO: 18597 - protein, 13 aa, Severe acute respiratory syndrome coronavirus 2
  REGION 1..13: note = Table B: HLA-DQA1*01:02-B1*06:02L
QSRNLQEFKPRSQ

SEQ ID NO: 18598 - protein, 12 aa, Severe acute respiratory syndrome coronavirus 2
  REGION 1..12: note = Table B: HLA-DQA1*01:02-B1*06:02L HLA-DRB1*08:01L
NLQEFKPRSQME

SEQ ID NO: 18599 - protein, 13 aa, Severe acute respiratory syndrome coronavirus 2
  REGION 1..13: note = Table B: HLA-DQA1*01:02-B1*06:02L HLA-DQA1*01-B1*05L HLA-DPA1*03:01-B1*105:01L HLA-DRB1*15:03L
DFLELAMDEFIER

SEQ ID NO: 18600 - protein, 13 aa, Severe acute respiratory syndrome coronavirus 2
  REGION 1..13: note = Table B: HLA-DQA1*01:02-B1*06:02L
AMDEFIERYKLEG

SEQ ID NO: 18601 - protein, 11 aa, Severe acute respiratory syndrome coronavirus 2
  REGION 1..11: note = Table B: HLA-DQA1*01:02-B1*06:02L HLA-DQA1*02:01-B1*03:03L
EFIERYKLEGY

SEQ ID NO: 18602 - protein, 10 aa, Severe acute respiratory syndrome coronavirus 2
  REGION 1..10: note = Table B: HLA-DQA1*01:02-B1*06:02L HLA-DQA1*01:03-B1*06:01L HLA-DQA1*02:01-B1*03:03L
ERYKLEGYAF

SEQ ID NO: 18603 - protein, 12 aa, Severe acute respiratory syndrome coronavirus 2
  REGION 1..12: note = Table B: HLA-DQA1*01:02-B1*06:02L
HSQLGGLHLLIG

SEQ ID NO: 18604 - protein, 12 aa, Severe acute respiratory syndrome coronavirus 2
  REGION 1..12: note = Table B: HLA-DQA1*01:02-B1*06:02L
QLGGLHLLIGLA

SEQ ID NO: 18605 - protein, 12 aa, Severe acute respiratory syndrome coronavirus 2
  REGION 1..12: note = Table B: HLA-DQA1*01:02-B1*06:02L HLA-DQA1*01:03-B1*06:01L HLA-DQA1*02:01-B1*03:03L
LGGLHLLIGLAK

SEQ ID NO: 18606 - protein, 10 aa, Severe acute respiratory syndrome coronavirus 2
  REGION 1..10: note = Table B: HLA-DQA1*01:02-B1*06:02L HLA-DQA1*02:01-B1*03:03L
HLLIGLAKRF

SEQ ID NO: 18607 - protein, 14 aa, Severe acute respiratory syndrome coronavirus 2
  REGION 1..14: note = Table B: HLA-DQA1*01:02-B1*06:02L HLA-DRB1*01:02L HLA-DRB1*08:01L HLA-DRB3*01:01L
LLIGLAKRFKESPF

SEQ ID NO: 18608 - protein, 11 aa, Severe acute respiratory syndrome coronavirus 2
  REGION 1..11: note = Table B: HLA-DQA1*01:02-B1*06:02L HLA-DPA1*03:01-B1*105:01L HLA-DQA1*01:03-B1*06:01L
FKESPFELEDF

SEQ ID NO: 18609 - protein, 12 aa, Severe acute respiratory syndrome coronavirus 2
  REGION 1..12: note = Table B: HLA-DQA1*01:02-B1*06:02L HLA-DPA1*02:01-B1*13:01L
ESPFELEDFIPM

SEQ ID NO: 18610 - protein, 13 aa, Severe acute respiratory syndrome coronavirus 2
  REGION 1..13: note = Table B: HLA-DQA1*01:02-B1*06:02L HLA-DQA1*05:01-B1*02:01L
PFELEDFIPMDST

SEQ ID NO: 18611 - protein, 10 aa, Severe acute respiratory syndrome coronavirus 2
  REGION 1..10: note = Table B: HLA-DQA1*01:02-B1*06:02L HLA-DQA1*05:05-B1*03:19L HLA-DQA1*01:03-B1*06:01L HLA-DQA1*02:01-B1*03:03L
PMDSTVKNYF

SEQ ID NO: 18612 - protein, 14 aa, Severe acute respiratory syndrome coronavirus 2
  REGION 1..14: note = Table B: HLA-DQA1*01:02-B1*06:02L
DAQTGSSKCVCSVI

SEQ ID NO: 18613 - protein, 12 aa, Severe acute respiratory syndrome coronavirus 2
  REGION 1..12: note = Table B: HLA-DQA1*01:02-B1*06:02L
TGSSKCVCSVID

SEQ ID NO: 18614 - protein, 12 aa, Severe acute respiratory syndrome coronavirus 2
  REGION 1..12: note = Table B: HLA-DQA1*01:02-B1*06:02L
LLDDFVEIIKSQ

SEQ ID NO: 18615 - protein, 13 aa, Severe acute respiratory syndrome coronavirus 2
  REGION 1..13: note = Table B: HLA-DQA1*01:02-B1*06:02L
IKSQDLSVVSKVV

SEQ ID NO: 18616 - protein, 12 aa, Severe acute respiratory syndrome coronavirus 2
  REGION 1..12: note = Table B: HLA-DQA1*01:02-B1*06:02L HLA-DPA1*03:01-B1*04:02L HLA-DPA1*01:03-B1*04:01L HLA-DPA1*01:03-B1*04:02L HLA-DPA1*03:01-B1*105:01L HLA-DPA1*01:02-B1*04:01L HLA-DQA1*01:03-B1*06:01L
TEISFMLWCKDG

SEQ ID NO: 18617 - protein, 12 aa, Severe acute respiratory syndrome coronavirus 2
  REGION 1..12: note = Table B: HLA-DQA1*01:02-B1*06:02L HLA-DPA1*03:01-B1*105:01L HLA-DRB1*15:03L
SFMLWCKDGHVE

SEQ ID NO: 18618 - protein, 15 aa, Severe acute respiratory syndrome coronavirus 2
  REGION 1..15: note = Table B: HLA-DQA1*01:02-B1*06:02L HLA-DRB1*01:02L HLA-DRB1*03:01L
MLWCKDGHVETFYPK

SEQ ID NO: 18619 - protein, 12 aa, Severe acute respiratory syndrome coronavirus 2
  REGION 1..12: note = Table B: HLA-DQA1*01:02-B1*06:02L HLA-DQA1*05:01-B1*02:01L HLA-DPA1*03:01-B1*105:01L HLA-DRB1*16:01L HLA-DQA1*01:03-B1*06:01L
DGHVETFYPKLQ

SEQ ID NO: 18620 - protein, 13 aa, Severe acute respiratory syndrome coronavirus 2
  REGION 1..13: note = Table B: HLA-DQA1*01:02-B1*06:02L HLA-DRB1*01:02L HLA-DRB1*08:04L HLA-DRB1*11:04L
PNLYKMQRMLLEK

SEQ ID NO: 18621 - protein, 15 aa, Severe acute respiratory syndrome coronavirus 2
  REGION 1..15: note = Table B: HLA-DQA1*01:02-B1*06:02L HLA-DPA1*03:01-B1*105:01L
YKMQRMLLEKCDLQN

SEQ ID NO: 18622 - protein, 12 aa, Severe acute respiratory syndrome coronavirus 2
  REGION 1..12: note = Table B: HLA-DQA1*01:02-B1*06:02L HLA-DPA1*03:01-B1*105:01L HLA-DQA1*01:03-B1*06:01L
MLLEKCDLQNYG

SEQ ID NO: 18623 - protein, 12 aa, Severe acute respiratory syndrome coronavirus 2
  REGION 1..12: note = Table B: HLA-DQA1*01:02-B1*06:02L HLA-DPA1*03:01-B1*105:01L HLA-DQA1*01:03-B1*06:01L
LEKCDLQNYGDS

SEQ ID NO: 18624 - protein, 11 aa, Severe acute respiratory syndrome coronavirus 2
  REGION 1..11: note = Table B: HLA-DQA1*01:02-B1*06:02L HLA-DRB1*01:02L HLA-DPA1*01:03-B1*03:01L HLA-DRB1*11:03L HLA-DRB1*08:01L HLA-DRB5*01:01L HLA-DPA1*01:03-B1*04:02L HLA-DRB1*12:02L HLA-DRB1*10:01L HLA-DRB1*15:03L
NYGDSATLPKG

SEQ ID NO: 18625 - protein, 11 aa, Severe acute respiratory syndrome coronavirus 2
  REGION 1..11: note = Table B: HLA-DQA1*01:02-B1*06:02L HLA-DQA1*03:01-B1*03:02L HLA-DQA1*02:01-B1*03:03L
LPKGIMMNVAK

SEQ ID NO: 18626 - protein, 11 aa, Severe acute respiratory syndrome coronavirus 2
  REGION 1..11: note = Table B: HLA-DQA1*01:02-B1*06:02L
PKGIMMNVAKY

SEQ ID NO: 18627 - protein, 10 aa, Severe acute respiratory syndrome coronavirus 2
  REGION 1..10: note = Table B: HLA-DQA1*01:02-B1*06:02L HLA-DQA1*05:05-B1*03:19L
VAKYTQLCQY

SEQ ID NO: 18628 - protein, 12 aa, Severe acute respiratory syndrome coronavirus 2
  REGION 1..12: note = Table B: HLA-DQA1*01:02-B1*06:02L HLA-DPA1*03:01-B1*105:01L
YTQLCQYLNTLT

SEQ ID NO: 18629 - protein, 12 aa, Severe acute respiratory syndrome coronavirus 2
  REGION 1..12: note = Table B: HLA-DQA1*01:02-B1*06:02L
TLAVPYNMRVIH

SEQ ID NO: 18630 - protein, 12 aa, Severe acute respiratory syndrome coronavirus 2
  REGION 1..12: note = Table B: HLA-DQA1*01:02-B1*06:02L
NMRVIHFGAGSD

SEQ ID NO: 18631 - protein, 13 aa, Severe acute respiratory syndrome coronavirus 2
  REGION 1..13: note = Table B: HLA-DQA1*01:02-B1*06:02L HLA-DRB1*15:03L
MRVIHFGAGSDKG

SEQ ID NO: 18632 - protein, 14 aa, Severe acute respiratory syndrome coronavirus 2
  REGION 1..14: note = Table B: HLA-DQA1*01:02-B1*06:02L HLA-DRB1*01:02L HLA-DRB1*08:01L
IHFGAGSDKGVAPG

SEQ ID NO: 18633 - protein, 14 aa, Severe acute respiratory syndrome coronavirus 2
  REGION 1..14: note = Table B: HLA-DQA1*01:02-B1*06:02L HLA-DRB1*01:02L
FGAGSDKGVAPGTA

SEQ ID NO: 18634 - protein, 13 aa, Severe acute respiratory syndrome coronavirus 2
  REGION 1..13: note = Table B: HLA-DQA1*01:02-B1*06:02L
AGSDKGVAPGTAV

SEQ ID NO: 18635 - protein, 12 aa, Severe acute respiratory syndrome coronavirus 2
  REGION 1..12: note = Table B: HLA-DQA1*01:02-B1*06:02L HLA-DQA1*05:05-B1*03:19L HLA-DQA1*05:01-B1*02:01L HLA-DQA1*05:05-B1*03:01L HLA-DQA1*01:03-B1*06:01L HLA-DQA1*02:01-B1*03:03L
SDKGVAPGTAVL

SEQ ID NO: 18636 - protein, 12 aa, Severe acute respiratory syndrome coronavirus 2
  REGION 1..12: note = Table B: HLA-DQA1*01:02-B1*06:02L HLA-DQA1*01:03-B1*06:01L
PGTAVLRQWLPT

SEQ ID NO: 18637 - protein, 12 aa, Severe acute respiratory syndrome coronavirus 2
  REGION 1..12: note = Table B: HLA-DQA1*01:02-B1*06:02L
PTGTLLVDSDLN

SEQ ID NO: 18638 - protein, 14 aa, Severe acute respiratory syndrome coronavirus 2
  REGION 1..14: note = Table B: HLA-DQA1*01:02-B1*06:02L HLA-DPA1*03:01-B1*105:01L HLA-DRB1*16:01L HLA-DQA1*02:01-B1*03:03L
LVDSDLNDFVSDAD

SEQ ID NO: 18639 - protein, 15 aa, Severe acute respiratory syndrome coronavirus 2
  REGION 1..15: note = Table B: HLA-DQA1*01:02-B1*06:02L HLA-DRB1*12:01L HLA-DPA1*02:01-B1*13:01L HLA-DPA1*03:01-B1*105:01L
VDSDLNDFVSDADST

SEQ ID NO: 18640 - protein, 13 aa, Severe acute respiratory syndrome coronavirus 2
  REGION 1..13: note = Table B: HLA-DQA1*01:02-B1*06:02L HLA-DRB1*03:01L HLA-DQA1*01:01-B1*05:01L HLA-DPA1*01:03-B1*04:02L HLA-DPA1*01:02-B1*04:01L HLA-DQA1*01:03-B1*06:01L
DLNDFVSDADSTL

SEQ ID NO: 18641 - protein, 14 aa, Severe acute respiratory syndrome coronavirus 2
  REGION 1..14: note = Table B: HLA-DQA1*01:02-B1*06:02L
FVSDADSTLIGDCA

SEQ ID NO: 18642 - protein, 11 aa, Severe acute respiratory syndrome coronavirus 2
  REGION 1..11: note = Table B: HLA-DQA1*01:02-B1*06:02L HLA-DQA1*05:05-B1*03:01L HLA-DQA1*01:03-B1*06:01L HLA-DQA1*02:01-B1*03:03L
IGDCATVHTAN

SEQ ID NO: 18643 - protein, 11 aa, Severe acute respiratory syndrome coronavirus 2
  REGION 1..11: note = Table B: HLA-DQA1*01:02-B1*06:02L HLA-DQA1*02:01-B1*03:03L
DCATVHTANKW

SEQ ID NO: 18644 - protein, 14 aa, Severe acute respiratory syndrome coronavirus 2
  REGION 1..14: note = Table B: HLA-DQA1*01:02-B1*06:02L HLA-DRB1*14:01L HLA-DRB1*15:03L
ATVHTANKWDLIIS

SEQ ID NO: 18645 - protein, 13 aa, Severe acute respiratory syndrome coronavirus 2
  REGION 1..13: note = Table B: HLA-DQA1*01:02-B1*06:02L HLA-DQA1*01-B1*05L HLA-DPA1*03:01-B1*105:01L HLA-DQA1*03:01-B1*03:02L HLA-DPA1*01:02-B1*04:01L HLA-DQA1*02:01-B1*03:03L
VHTANKWDLIISD

SEQ ID NO: 18646 - protein, 10 aa, Severe acute respiratory syndrome coronavirus 2
  REGION 1..10: note = Table B: HLA-DQA1*01:02-B1*06:02L HLA-DPA1*01:03-B1*03:01L HLA-DRB1*03:01L HLA-DRB1*11:02L HLA-DRB1*14:02L HLA-DQA1*01-B1*05L HLA-DQA1*05:05-B1*03:19M HLA-DQA1*05:01-B1*02:01L HLA-DRB4*01:01L
  REGION 1..10: note = CONT. FROM ABOVE: HLA-DPA1*01:03-B1*04:01L HLA-DPA1*02:01-B1*13: 01L HLA-DPA1*01:03-B1*104:01L HLA-DRB1*16:01L
KWDLIISDMY

SEQ ID NO: 18647 - protein, 10 aa, Severe acute respiratory syndrome coronavirus 2
  REGION 1..10: note = Table B: HLA-DQA1*01:02-B1*06:02L HLA-DRB1*08:77L HLA-DPA1*01:03-B1*03:01L HLA-DRB1*03:01L HLA-DRB1*11:02L HLA-DQA1*01-B1*05L HLA-DQA1*05:05-B1*03:19M HLA-DQA1*05:01-B1*02:01L HLA-DRB4*01:01L
  REGION 1..10: note = CONT. FROM ABOVE: HLA-DPA1*01:03-B1*104:01L HLA-DRB1*10:01L HLA- DRB1*16:01L
NDSKEGFFTY

SEQ ID NO: 18648 - protein, 15 aa, Severe acute respiratory syndrome coronavirus 2
  REGION 1..15: note = Table B: HLA-DQA1*01:02-B1*06:02L HLA-DPA1*01:03-B1*03:01L HLA-DPA1*03:01-B1*04:02L HLA-DQA1*01-B1*05L HLA-DPA1*03:01-B1*105:01L HLA-DRB1*15:03L
DSKEGFFTYICGFIQ

SEQ ID NO: 18649 - protein, 10 aa, Severe acute respiratory syndrome coronavirus 2
  REGION 1..10: note = Table B: HLA-DQA1*01:02-B1*06:02L HLA-DPA1*03:01-B1*105:01L HLA-DQA1*03:01-B1*03:02L HLA-DPA1*01:02-B1*04:01L HLA-DQA1*01:03-B1*06:01L HLA-DQA1*02:01-B1*03:03L
TYICGFIQQK

SEQ ID NO: 18650 - protein, 12 aa, Severe acute respiratory syndrome coronavirus 2
  REGION 1..12: note = Table B: HLA-DQA1*01:02-B1*06:02L HLA-DRB1*14:01L HLA-DQA1*03:01-B1*03:02L HLA-DRB1*04:08L HLA-DQA1*02:01-B1*03:03L
GFIQQKLALGGS

SEQ ID NO: 18651 - protein, 12 aa, Severe acute respiratory syndrome coronavirus 2
  REGION 1..12: note = Table B: HLA-DQA1*01:02-B1*06:02L HLA-DRB1*14:01L HLA-DPA1*03:01-B1*105:01L HLA-DQA1*03:01-B1*03:02L HLA-DQA1*02:01-B1*03:03L
FIQQKLALGGSV

SEQ ID NO: 18652 - protein, 11 aa, Severe acute respiratory syndrome coronavirus 2
  REGION 1..11: note = Table B: HLA-DQA1*01:02-B1*06:02L
GGSVAIKITEH

SEQ ID NO: 18653 - protein, 12 aa, Severe acute respiratory syndrome coronavirus 2
  REGION 1..12: note = Table B: HLA-DQA1*01:02-B1*06:02L HLA-DPA1*03:01-B1*105:01L HLA-DQA1*01:03-B1*06:01L
IKITEHSWNADL

SEQ ID NO: 18654 - protein, 12 aa, Severe acute respiratory syndrome coronavirus 2
  REGION 1..12: note = Table B: HLA-DQA1*01:02-B1*06:02L HLA-DPA1*01:03-B1*04:02L
SWNADLYKLMGH

SEQ ID NO: 18655 - protein, 11 aa, Severe acute respiratory syndrome coronavirus 2
  REGION 1..11: note = Table B: HLA-DQA1*01:02-B1*06:02L HLA-DQA1*01:03-B1*06:01L HLA-DQA1*02:01-B1*03:03L
NADLYKLMGHF

SEQ ID NO: 18656 - protein, 10 aa, Severe acute respiratory syndrome coronavirus 2
  REGION 1..10: note = Table B: HLA-DQA1*01:02-B1*06:02L HLA-DPA1*03:01-B1*04:02L HLA-DQA1*01-B1*05L HLA-DPA1*01:03-B1*04:01L HLA-DPA1*01:03-B1*04:02L HLA-DPA1*03:01-B1*105:01L HLA-DPA1*01:02-B1*04:01L HLA-DQA1*01:03-B1*06:01L
WWTAFVTNVN

SEQ ID NO: 18657 - protein, 13 aa, Severe acute respiratory syndrome coronavirus 2
  REGION 1..13: note = Table B: HLA-DQA1*01:02-B1*06:02L HLA-DPA1*03:01-B1*105:01L
NASSSEAFLIGCN

SEQ ID NO: 18658 - protein, 11 aa, Severe acute respiratory syndrome coronavirus 2
  REGION 1..11: note = Table B: HLA-DQA1*01:02-B1*06:02L
SSEAFLIGCNY

SEQ ID NO: 18659 - protein, 11 aa, Severe acute respiratory syndrome coronavirus 2
  REGION 1..11: note = Table B: HLA-DQA1*01:02-B1*06:02L HLA-DPA1*01:02-B1*04:01L
LIGCNYLGKPR

SEQ ID NO: 18660 - protein, 12 aa, Severe acute respiratory syndrome coronavirus 2
  REGION 1..12: note = Table B: HLA-DQA1*01:02-B1*06:02L
IGCNYLGKPREQ

SEQ ID NO: 18661 - protein, 10 aa, Severe acute respiratory syndrome coronavirus 2
  REGION 1..10: note = Table B: HLA-DQA1*01:02-B1*06:02L HLA-DQA1*01:03-B1*06:01L
YLGKPREQID

SEQ ID NO: 18662 - protein, 14 aa, Severe acute respiratory syndrome coronavirus 2
  REGION 1..14: note = Table B: HLA-DQA1*01:02-B1*06:02L
VMHANYIFWRNTNP

SEQ ID NO: 18663 - protein, 12 aa, Severe acute respiratory syndrome coronavirus 2
  REGION 1..12: note = Table B: HLA-DQA1*01:02-B1*06:02L HLA-DRB1*08:04L HLA-DPA1*01:03-B1*03:01L HLA-DRB1*11:04L HLA-DRB1*12:02L HLA-DQA1*05:05-B1*03:01L HLA-DRB1*14:17L HLA-DRB1*04:08L
FWRNTNPIQLSS

SEQ ID NO: 18664 - protein, 13 aa, Severe acute respiratory syndrome coronavirus 2
  REGION 1..13: note = Table B: HLA-DQA1*01:02-B1*06:02L
IQLSSYSLFDMSK

SEQ ID NO: 18665 - protein, 11 aa, Severe acute respiratory syndrome coronavirus 2
  REGION 1..11: note = Table B: HLA-DQA1*01:02-B1*06:02L
SSYSLFDMSKF

SEQ ID NO: 18666 - protein, 14 aa, Severe acute respiratory syndrome coronavirus 2
  REGION 1..14: note = Table B: HLA-DQA1*01:02-B1*06:02L
FDMSKFPLKLRGTA

SEQ ID NO: 18667 - protein, 12 aa, Severe acute respiratory syndrome coronavirus 2
  REGION 1..12: note = Table B: HLA-DQA1*01:02-B1*06:02L HLA-DQA1*05:05-B1*03:01L
RGTAVMSLKEGQ

SEQ ID NO: 18668 - protein, 12 aa, Severe acute respiratory syndrome coronavirus 2
  REGION 1..12: note = Table B: HLA-DQA1*01:02-B1*06:02L HLA-DRB1*14:01L HLA-DQA1*05:01-B1*02:01L
GTAVMSLKEGQI

SEQ ID NO: 18669 - protein, 12 aa, Severe acute respiratory syndrome coronavirus 2
  REGION 1..12: note = Table B: HLA-DQA1*01:02-B1*06:02L HLA-DPA1*03:01-B1*105:01L
LKEGQINDMILS

SEQ ID NO: 18670 - protein, 12 aa, Severe acute respiratory syndrome coronavirus 2
  REGION 1..12: note = Table B: HLA-DQA1*01:02-B1*06:02L HLA-DPA1*03:01-B1*105:01L HLA-DQA1*03:01-B1*03:02L HLA-DQA1*05:05-B1*03:01L HLA-DQA1*01:03-B1*06:01L HLA-DQA1*02:01-B1*03:03L
INDMILSLLSKG

SEQ ID NO: 18671 - protein, 11 aa, Severe acute respiratory syndrome coronavirus 2
  REGION 1..11: note = Table B: HLA-DQA1*01:02-B1*06:02L HLA-DQA1*01:03-B1*06:01L HLA-DQA1*02:01-B1*03:03L
DMILSLLSKGR

SEQ ID NO: 18672 - protein, 12 aa, Severe acute respiratory syndrome coronavirus 2
  REGION 1..12: note = Table B: HLA-DQA1*01:02-B1*06:02L HLA-DRB1*01:02L HLA-DPA1*03:01-B1*105:01L HLA-DRB1*16:01L
MILSLLSKGRLI

SEQ ID NO: 18673 - protein, 13 aa, Severe acute respiratory syndrome coronavirus 2
  REGION 1..13: note = Table B: HLA-DQA1*01:02-B1*06:02L
LLSKGRLIIRENN

SEQ ID NO: 18674 - protein, 12 aa, Severe acute respiratory syndrome coronavirus 2
  REGION 1..12: note = Table B: HLA-DQA1*01:02-B1*06:02L HLA-DQA1*05:01-B1*02:01L HLA-DQA1*01:03-B1*06:01L HLA-DQA1*02:01-B1*03:03L
ENNRVVISSDVL

SEQ ID NO: 18675 - protein, 13 aa, Severe acute respiratory syndrome coronavirus 2
  REGION 1..13: note = Table B: HLA-DQA1*01:02-B1*06:02L HLA-DPA1*03:01-B1*04:02L HLA-DPA1*01:03-B1*04:02L
FVFLVLLPLVSSQ

SEQ ID NO: 18676 - protein, 12 aa, Severe acute respiratory syndrome coronavirus 2
  REGION 1..12: note = Table B: HLA-DQA1*01:02-B1*06:02L HLA-DPA1*03:01-B1*105:01L
LPLVSSQCVNLT

SEQ ID NO: 18677 - protein, 11 aa, Severe acute respiratory syndrome coronavirus 2
  REGION 1..11: note = Table B: HLA-DQA1*01:02-B1*06:02L HLA-DQA1*01:03-B1*06:01L HLA-DQA1*02:01-B1*03:03L
VSSQCVNLTTR

SEQ ID NO: 18678 - protein, 12 aa, Severe acute respiratory syndrome coronavirus 2
  REGION 1..12: note = Table B: HLA-DQA1*01:02-B1*06:02L HLA-DQA1*01:03-B1*06:01L
SSQCVNLTTRTQ

SEQ ID NO: 18679 - protein, 10 aa, Severe acute respiratory syndrome coronavirus 2
  REGION 1..10: note = Table B: HLA-DQA1*01:02-B1*06:02L HLA-DPA1*02:01-B1*13:01L HLA-DPA1*03:01-B1*105:01L HLA-DQA1*01:03-B1*06:01L HLA-DQA1*02:01-B1*03:03L
QLPPAYTNSF

SEQ ID NO: 18680 - protein, 10 aa, Severe acute respiratory syndrome coronavirus 2
  REGION 1..10: note = Table B: HLA-DQA1*01:02-B1*06:02L HLA-DPA1*03:01-B1*105:01L HLA-DQA1*01:03-B1*06:01L HLA-DQA1*02:01-B1*03:03L
FRSSVLHSTQ

SEQ ID NO: 18681 - protein, 10 aa, Severe acute respiratory syndrome coronavirus 2
  REGION 1..10: note = Table B: HLA-DQA1*01:02-B1*06:02L HLA-DQA1*03:01-B1*03:02L HLA-DQA1*01:03-B1*06:01L HLA-DQA1*02:01-B1*03:03L
RSSVLHSTQD

SEQ ID NO: 18682 - protein, 10 aa, Severe acute respiratory syndrome coronavirus 2
  REGION 1..10: note = Table B: HLA-DQA1*01:02-B1*06:02L HLA-DQA1*01:03-B1*06:01L
HSTQDLFLPF

SEQ ID NO: 18683 - protein, 11 aa, Severe acute respiratory syndrome coronavirus 2
  REGION 1..11: note = Table B: HLA-DQA1*01:02-B1*06:02L HLA-DPA1*03:01-B1*04:02L HLA-DPA1*03:01-B1*105:01L HLA-DQA1*01:03-B1*06:01L HLA-DQA1*02:01-B1*03:03L
FSNVTWFHAIH

SEQ ID NO: 18684 - protein, 12 aa, Severe acute respiratory syndrome coronavirus 2
  REGION 1..12: note = Table B: HLA-DQA1*01:02-B1*06:02L HLA-DPA1*03:01-B1*04:02L
VTWFHAIHVSGT

SEQ ID NO: 18685 - protein, 10 aa, Severe acute respiratory syndrome coronavirus 2
  REGION 1..10: note = Table B: HLA-DQA1*01:02-B1*06:02L HLA-DQA1*02:01-B1*03:03L
FHAIHVSGTN

SEQ ID NO: 18686 - protein, 14 aa, Severe acute respiratory syndrome coronavirus 2
  REGION 1..14: note = Table B: HLA-DQA1*01:02-B1*06:02L HLA-DQA1*03:01-B1*03:02L
VSGTNGTKRFDNPV

SEQ ID NO: 18687 - protein, 12 aa, Severe acute respiratory syndrome coronavirus 2
  REGION 1..12: note = Table B: HLA-DQA1*01:02-B1*06:02L
FNDGVYFASTEK

SEQ ID NO: 18688 - protein, 12 aa, Severe acute respiratory syndrome coronavirus 2
  REGION 1..12: note = Table B: HLA-DQA1*01:02-B1*06:02L
EKSNIIRGWIFG

SEQ ID NO: 18689 - protein, 11 aa, Severe acute respiratory syndrome coronavirus 2
  REGION 1..11: note = Table B: HLA-DQA1*01:02-B1*06:02L HLA-DPA1*03:01-B1*04:02L HLA-DPA1*03:01-B1*105:01L HLA-DQA1*02:01-B1*03:03L
NIIRGWIFGTT

SEQ ID NO: 18690 - protein, 12 aa, Severe acute respiratory syndrome coronavirus 2
  REGION 1..12: note = Table B: HLA-DQA1*01:02-B1*06:02L
LDSKTQSLLIVN

SEQ ID NO: 18691 - protein, 13 aa, Severe acute respiratory syndrome coronavirus 2
  REGION 1..13: note = Table B: HLA-DQA1*01:02-B1*06:02L
SKTQSLLIVNNAT

SEQ ID NO: 18692 - protein, 12 aa, Severe acute respiratory syndrome coronavirus 2
  REGION 1..12: note = Table B: HLA-DQA1*01:02-B1*06:02L HLA-DRB1*08:04L HLA-DPA1*01:03-B1*03:01L HLA-DPA1*03:01-B1*04:02L HLA-DRB1*11:03L HLA-DRB1*11:04L HLA-DRB1*14:02L HLA-DQA1*05:05-B1*03:01L HLA-DRB1*10:01L HLA-DRB1*04:08L
SLLIVNNATNVV

SEQ ID NO: 18693 - protein, 11 aa, Severe acute respiratory syndrome coronavirus 2
  REGION 1..11: note = Table B: HLA-DQA1*01:02-B1*06:02L
NATNVVIKVCE

SEQ ID NO: 18694 - protein, 11 aa, Severe acute respiratory syndrome coronavirus 2
  REGION 1..11: note = Table B: HLA-DQA1*01:02-B1*06:02L HLA-DQA1*05:05-B1*03:19L
ATNVVIKVCEF

SEQ ID NO: 18695 - protein, 10 aa, Severe acute respiratory syndrome coronavirus 2
  REGION 1..10: note = Table B: HLA-DQA1*01:02-B1*06:02L HLA-DRB1*12:01L HLA-DQA1*01:03-B1*06:01L HLA-DRB1*15:03L
VVIKVCEFQF

SEQ ID NO: 18696 - protein, 13 aa, Severe acute respiratory syndrome coronavirus 2
  REGION 1..13: note = Table B: HLA-DQA1*01:02-B1*06:02L HLA-DPA1*01:03-B1*04:02L HLA-DPA1*01:02-B1*04:01L
VIKVCEFQFCNDP

SEQ ID NO: 18697 - protein, 13 aa, Severe acute respiratory syndrome coronavirus 2
  REGION 1..13: note = Table B: HLA-DQA1*01:02-B1*06:02L HLA-DPA1*01:03-B1*04:02L HLA-DPA1*01:02-B1*04:01L HLA-DQA1*01:03-B1*06:01L
IKVCEFQFCNDPF

SEQ ID NO: 18698 - protein, 10 aa, Severe acute respiratory syndrome coronavirus 2
  REGION 1..10: note = Table B: HLA-DQA1*01:02-B1*06:02L HLA-DPA1*01:03-B1*03:01L HLA-DPA1*03:01-B1*04:02L HLA-DRB1*03:01L HLA-DRB1*11:02L HLA-DRB1*14:02L HLA-DQA1*01-B1*05L HLA-DQA1*05:05-B1*03:19L HLA-DQA1*05:01-B1*02:01L HLA-DRB4*01:01L
  REGION 1..10: note = CONT. FROM ABOVE: HLA-DPA1*01:03-B1*04:01L HLA-DPA1*01:03-B1*04: 02L HLA-DPA1*03:01-B1*105:01L HLA-DPA1*01:03-B1*104:01L HLA-DRB1 *16:01L HLA-DRB1*15:03L
FCNDPFLGVY

SEQ ID NO: 18699 - protein, 12 aa, Severe acute respiratory syndrome coronavirus 2
  REGION 1..12: note = Table B: HLA-DQA1*01:02-B1*06:02L HLA-DRB1*16:01L
KNNKSWMESEFR

SEQ ID NO: 18700 - protein, 12 aa, Severe acute respiratory syndrome coronavirus 2
  REGION 1..12: note = Table B: HLA-DQA1*01:02-B1*06:02L
MESEFRVYSSAN

SEQ ID NO: 18701 - protein, 10 aa, Severe acute respiratory syndrome coronavirus 2
  REGION 1..10: note = Table B: HLA-DQA1*01:02-B1*06:02L HLA-DQA1*05:05-B1*03:19L HLA-DQA1*05:01-B1*02:01L
SSANNCTFEY

SEQ ID NO: 18702 - protein, 13 aa, Severe acute respiratory syndrome coronavirus 2
  REGION 1..13: note = Table B: HLA-DQA1*01:02-B1*06:02L
ANNCTFEYVSQPF

SEQ ID NO: 18703 - protein, 11 aa, Severe acute respiratory syndrome coronavirus 2
  REGION 1..11: note = Table B: HLA-DQA1*01:02-B1*06:02L HLA-DPA1*01:03-B1*04:02L HLA-DRB1*12:01L HLA-DRB1*16:01L HLA-DRB1*04:08L
FEYVSQPFLMD

SEQ ID NO: 18704 - protein, 13 aa, Severe acute respiratory syndrome coronavirus 2
  REGION 1..13: note = Table B: HLA-DQA1*01:02-B1*06:02L HLA-DRB1*01:02L HLA-DQA1*01:01-B1*05:01L HLA-DPA1*02:01-B1*13:01L
VSQPFLMDLEGKQ

SEQ ID NO: 18705 - protein, 13 aa, Severe acute respiratory syndrome coronavirus 2
  REGION 1..13: note = Table B: HLA-DQA1*01:02-B1*06:02L HLA-DRB1*15:03L
QPFLMDLEGKQGN

SEQ ID NO: 18706 - protein, 13 aa, Severe acute respiratory syndrome coronavirus 2
  REGION 1..13: note = Table B: HLA-DQA1*01:02-B1*06:02L HLA-DPA1*03:01-B1*105:01L
PFLMDLEGKQGNF

SEQ ID NO: 18707 - protein, 12 aa, Severe acute respiratory syndrome coronavirus 2
  REGION 1..12: note = Table B: HLA-DQA1*01:02-B1*06:02L HLA-DRB1*01:02L HLA-DQA1*02:01-B1*03:03L
LMDLEGKQGNFK

SEQ ID NO: 18708 - protein, 15 aa, Severe acute respiratory syndrome coronavirus 2
  REGION 1..15: note = Table B: HLA-DQA1*01:02-B1*06:02L
DLEGKQGNFKNLREF

SEQ ID NO: 18709 - protein, 13 aa, Severe acute respiratory syndrome coronavirus 2
  REGION 1..13: note = Table B: HLA-DQA1*01:02-B1*06:02L HLA-DPA1*03:01-B1*04:02L HLA-DPA1*03:01-B1*105:01L HLA-DRB1*16:01L
FKNLREFVFKNID

SEQ ID NO: 18710 - protein, 12 aa, Severe acute respiratory syndrome coronavirus 2
  REGION 1..12: note = Table B: HLA-DQA1*01:02-B1*06:02L HLA-DRB1*08:01L HLA-DPA1*01:02-B1*04:01L HLA-DRB1*16:01L HLA-DRB1*04:08L HLA-DQA1*02:01-B1*03:03L
NLREFVFKNIDG

SEQ ID NO: 18711 - protein, 14 aa, Severe acute respiratory syndrome coronavirus 2
  REGION 1..14: note = Table B: HLA-DQA1*01:02-B1*06:02L
YSKHTPINLVRDLP

SEQ ID NO: 18712 - protein, 12 aa, Severe acute respiratory syndrome coronavirus 2
  REGION 1..12: note = Table B: HLA-DQA1*01:02-B1*06:02L HLA-DRB1*01:02L HLA-DRB1*08:01L
HTPINLVRDLPQ

SEQ ID NO: 18713 - protein, 14 aa, Severe acute respiratory syndrome coronavirus 2
  REGION 1..14: note = Table B: HLA-DQA1*01:02-B1*06:02L
LVRDLPQGFSALEP

SEQ ID NO: 18714 - protein, 14 aa, Severe acute respiratory syndrome coronavirus 2
  REGION 1..14: note = Table B: HLA-DQA1*01:02-B1*06:02L HLA-DQA1*05:01-B1*02:01L HLA-DQA1*01:03-B1*06:01L HLA-DQA1*02:01-B1*03:03L
VRDLPQGFSALEPL

SEQ ID NO: 18715 - protein, 12 aa, Severe acute respiratory syndrome coronavirus 2
  REGION 1..12: note = Table B: HLA-DQA1*01:02-B1*06:02L HLA-DRB1*01:02L HLA-DPA1*01:03-B1*03:01L HLA-DPA1*03:01-B1*04:02L HLA-DQA1*05:05-B1*03:19L HLA-DPA1*02:01-B1*13:01L HLA-DQA1*05:05-B1*03:01L
LEPLVDLPIGIN

SEQ ID NO: 18716 - protein, 13 aa, Severe acute respiratory syndrome coronavirus 2
  REGION 1..13: note = Table B: HLA-DQA1*01:02-B1*06:02L HLA-DPA1*03:01-B1*105:01L HLA-DQA1*05:05-B1*03:01L HLA-DRB1*15:03L
EPLVDLPIGINIT

SEQ ID NO: 18717 - protein, 10 aa, Severe acute respiratory syndrome coronavirus 2
  REGION 1..10: note = Table B: HLA-DQA1*01:02-B1*06:02L HLA-DQA1*05:05-B1*03:19L
AGAAAYYVGY

SEQ ID NO: 18718 - protein, 12 aa, Severe acute respiratory syndrome coronavirus 2
  REGION 1..12: note = Table B: HLA-DQA1*01:02-B1*06:02L HLA-DRB1*01:02L HLA-DQA1*01-B1*05L HLA-DQA1*05:01-B1*02:01L HLA-DPA1*03:01-B1*105:01L
FLLKYNENGTIT

SEQ ID NO: 18719 - protein, 11 aa, Severe acute respiratory syndrome coronavirus 2
  REGION 1..11: note = Table B: HLA-DQA1*01:02-B1*06:02L HLA-DQA1*05:01-B1*02:01L HLA-DQA1*01:03-B1*06:01L HLA-DQA1*02:01-B1*03:03L
NENGTITDAVD

SEQ ID NO: 18720 - protein, 14 aa, Severe acute respiratory syndrome coronavirus 2
  REGION 1..14: note = Table B: HLA-DQA1*01:02-B1*06:02L HLA-DRB1*01:02L HLA-DPA1*03:01-B1*105:01L HLA-DQA1*01:03-B1*06:01L HLA-DRB1*15:03L
DPLSETKCTLKSFT

SEQ ID NO: 18721 - protein, 15 aa, Severe acute respiratory syndrome coronavirus 2
  REGION 1..15: note = Table B: HLA-DQA1*01:02-B1*06:02L
PLSETKCTLKSFTVE

SEQ ID NO: 18722 - protein, 15 aa, Severe acute respiratory syndrome coronavirus 2
  REGION 1..15: note = Table B: HLA-DQA1*01:02-B1*06:02L
SETKCTLKSFTVEKG

SEQ ID NO: 18723 - protein, 11 aa, Severe acute respiratory syndrome coronavirus 2
  REGION 1..11: note = Table B: HLA-DQA1*01:02-B1*06:02L HLA-DQA1*05:05-B1*03:19L HLA-DQA1*02:01-B1*03:03L
VEKGIYQTSNF

SEQ ID NO: 18724 - protein, 11 aa, Severe acute respiratory syndrome coronavirus 2
  REGION 1..11: note = Table B: HLA-DQA1*01:02-B1*06:02L HLA-DPA1*03:01-B1*04:02L HLA-DQA1*05:01-B1*02:01L HLA-DPA1*01:03-B1*04:01L HLA-DPA1*01:03-B1*04:02L HLA-DRB1*04:08L
YQTSNFRVQPT

SEQ ID NO: 18725 - protein, 12 aa, Severe acute respiratory syndrome coronavirus 2
  REGION 1..12: note = Table B: HLA-DQA1*01:02-B1*06:02L
QTSNFRVQPTES

SEQ ID NO: 18726 - protein, 13 aa, Severe acute respiratory syndrome coronavirus 2
  REGION 1..13: note = Table B: HLA-DQA1*01:02-B1*06:02L HLA-DRB1*08:77L HLA-DPA1*01:03-B1*03:01L HLA-DRB1*11:03L HLA-DRB1*11:04L HLA-DRB1*14:02L HLA-DRB1*08:01L HLA-DQA1*05:05-B1*03:19L HLA-DPA1*01:03-B1*04:01L HLA-DRB1*04:10L HLA-DRB1*09:01L
  REGION 1..13: note = CONT. FROM ABOVE: HLA-DPA1*01:03-B1*04:02L HLA-DRB3*01:01L HLA-D QA1*05:05-B1*03:01L HLA-DRB1*07:01L HLA-DRB1*10:01L HLA-DRB1*08: 03L
TSNFRVQPTESIV

SEQ ID NO: 18727 - protein, 12 aa, Severe acute respiratory syndrome coronavirus 2
  REGION 1..12: note = Table B: HLA-DQA1*01:02-B1*06:02L HLA-DQA1*05:01-B1*02:01L HLA-DPA1*03:01-B1*105:01L
PTESIVRFPNIT

SEQ ID NO: 18728 - protein, 12 aa, Severe acute respiratory syndrome coronavirus 2
  REGION 1..12: note = Table B: HLA-DQA1*01:02-B1*06:02L HLA-DQA1*01-B1*05L HLA-DQA1*05:01-B1*02:01L HLA-DPA1*03:01-B1*105:01L HLA-DQA1*03:01-B1*03:02L HLA-DQA1*01:03-B1*06:01L HLA-DQA1*02:01-B1*03:03L HLA-DRB1*15:03L
ITNLCPFGEVFN

SEQ ID NO: 18729 - protein, 12 aa, Severe acute respiratory syndrome coronavirus 2
  REGION 1..12: note = Table B: HLA-DQA1*01:02-B1*06:02L
LCPFGEVFNATR

SEQ ID NO: 18730 - protein, 10 aa, Severe acute respiratory syndrome coronavirus 2
  REGION 1..10: note = Table B: HLA-DQA1*01:02-B1*06:02L HLA-DQA1*02:01-B1*03:03L
ATRFASVYAW

SEQ ID NO: 18731 - protein, 13 aa, Severe acute respiratory syndrome coronavirus 2
  REGION 1..13: note = Table B: HLA-DQA1*01:02-B1*06:02L HLA-DRB1*08:04L
FASVYAWNRKRIS

SEQ ID NO: 18732 - protein, 12 aa, Severe acute respiratory syndrome coronavirus 2
  REGION 1..12: note = Table B: HLA-DQA1*01:02-B1*06:02L HLA-DPA1*03:01-B1*105:01L HLA-DQA1*05:05-B1*03:01L
RISNCVADYSVL

SEQ ID NO: 18733 - protein, 12 aa, Severe acute respiratory syndrome coronavirus 2
  REGION 1..12: note = Table B: HLA-DQA1*01:02-B1*06:02L HLA-DQA1*05:05-B1*03:19L HLA-DPA1*03:01-B1*105:01L
ISNCVADYSVLY

SEQ ID NO: 18734 - protein, 10 aa, Severe acute respiratory syndrome coronavirus 2
  REGION 1..10: note = Table B: HLA-DQA1*01:02-B1*06:02L HLA-DQA1*01:03-B1*06:01L
YSVLYNSASF

SEQ ID NO: 18735 - protein, 14 aa, Severe acute respiratory syndrome coronavirus 2
  REGION 1..14: note = Table B: HLA-DQA1*01:02-B1*06:02L HLA-DRB1*01:02L HLA-DRB1*12:01L HLA-DPA1*03:01-B1*105:01L HLA-DRB1*16:01L
SASFSTFKCYGVSP

SEQ ID NO: 18736 - protein, 11 aa, Severe acute respiratory syndrome coronavirus 2
  REGION 1..11: note = Table B: HLA-DQA1*01:02-B1*06:02L HLA-DQA1*05:05-B1*03:19L HLA-DQA1*02:01-B1*03:03L
KLNDLCFTNVY

SEQ ID NO: 18737 - protein, 13 aa, Severe acute respiratory syndrome coronavirus 2
  REGION 1..13: note = Table B: HLA-DQA1*01:02-B1*06:02L
LNDLCFTNVYADS

SEQ ID NO: 18738 - protein, 12 aa, Severe acute respiratory syndrome coronavirus 2
  REGION 1..12: note = Table B: HLA-DQA1*01:02-B1*06:02L HLA-DRB1*15:03L
FTNVYADSFVIR

SEQ ID NO: 18739 - protein, 10 aa, Severe acute respiratory syndrome coronavirus 2
  REGION 1..10: note = Table B: HLA-DQA1*01:02-B1*06:02L HLA-DQA1*05:05-B1*03:19L HLA-DQA1*05:01-B1*02:01L HLA-DQA1*02:01-B1*03:03L
PGQTGKIADY

SEQ ID NO: 18740 - protein, 13 aa, Severe acute respiratory syndrome coronavirus 2
  REGION 1..13: note = Table B: HLA-DQA1*01:02-B1*06:02L HLA-DQA1*05:05-B1*03:19L HLA-DPA1*03:01-B1*105:01L HLA-DQA1*05:05-B1*03:01L HLA-DQA1*01:03-B1*06:01L
LPDDFTGCVIAWN

SEQ ID NO: 18741 - protein, 11 aa, Severe acute respiratory syndrome coronavirus 2
  REGION 1..11: note = Table B: HLA-DQA1*01:02-B1*06:02L HLA-DQA1*05:05-B1*03:01L
FTGCVIAWNSN

SEQ ID NO: 18742 - protein, 11 aa, Severe acute respiratory syndrome coronavirus 2
  REGION 1..11: note = Table B: HLA-DQA1*01:02-B1*06:02L
TGCVIAWNSNN

SEQ ID NO: 18743 - protein, 10 aa, Severe acute respiratory syndrome coronavirus 2
  REGION 1..10: note = Table B: HLA-DQA1*01:02-B1*06:02L HLA-DPA1*01:03-B1*03:01L HLA-DRB1*03:01L HLA-DQA1*05:05-B1*03:19L HLA-DQA1*05:01-B1*02:01L HLA-DPA1*01:03-B1*104:01L HLA-DRB1*16:01L HLA-DQA1*02:01-B1*03:03L
KVGGNYNYLY

SEQ ID NO: 18744 - protein, 10 aa, Severe acute respiratory syndrome coronavirus 2
  REGION 1..10: note = Table B: HLA-DQA1*01:02-B1*06:02L HLA-DQA1*01:03-B1*06:01L
GNYNYLYRLF

SEQ ID NO: 18745 - protein, 12 aa, Severe acute respiratory syndrome coronavirus 2
  REGION 1..12: note = Table B: HLA-DQA1*01:02-B1*06:02L HLA-DRB1*01:02L HLA-DPA1*03:01-B1*04:02L HLA-DRB1*14:01L HLA-DRB1*11:04L HLA-DRB1*11:01L HLA-DRB1*12:01L HLA-DRB3*01:01L HLA-DPA1*03:01-B1*105:01L HLA-DRB1*15:03L
YNYLYRLFRKSN

SEQ ID NO: 18746 - protein, 11 aa, Severe acute respiratory syndrome coronavirus 2
  REGION 1..11: note = Table B: HLA-DQA1*01:02-B1*06:02L HLA-DRB1*11:02L HLA-DRB1*14:02L HLA-DQA1*02:01-B1*03:03L
PFERDISTEIY

SEQ ID NO: 18747 - protein, 12 aa, Severe acute respiratory syndrome coronavirus 2
  REGION 1..12: note = Table B: HLA-DQA1*01:02-B1*06:02L
RDISTEIYQAGS

SEQ ID NO: 18748 - protein, 12 aa, Severe acute respiratory syndrome coronavirus 2
  REGION 1..12: note = Table B: HLA-DQA1*01:02-B1*06:02L HLA-DQA1*01:03-B1*06:01L
GSTPCNGVEGFN

SEQ ID NO: 18749 - protein, 14 aa, Severe acute respiratory syndrome coronavirus 2
  REGION 1..14: note = Table B: HLA-DQA1*01:02-B1*06:02L
NGVEGFNCYFPLQS

SEQ ID NO: 18750 - protein, 12 aa, Severe acute respiratory syndrome coronavirus 2
  REGION 1..12: note = Table B: HLA-DQA1*01:02-B1*06:02L HLA-DPA1*03:01-B1*105:01L
GFNCYFPLQSYG

SEQ ID NO: 18751 - protein, 10 aa, Severe acute respiratory syndrome coronavirus 2
  REGION 1..10: note = Table B: HLA-DQA1*01:02-B1*06:02L HLA-DQA1*05:05-B1*03:19L HLA-DQA1*05:01-B1*02:01L
PTNGVGYQPY

SEQ ID NO: 18752 - protein, 12 aa, Severe acute respiratory syndrome coronavirus 2
  REGION 1..12: note = Table B: HLA-DQA1*01:02-B1*06:02L HLA-DPA1*03:01-B1*04:02L HLA-DPA1*03:01-B1*105:01L HLA-DRB1*15:03L
VVVLSFELLHAP

SEQ ID NO: 18753 - protein, 12 aa, Severe acute respiratory syndrome coronavirus 2
  REGION 1..12: note = Table B: HLA-DQA1*01:02-B1*06:02L
PATVCGPKKSTN

SEQ ID NO: 18754 - protein, 15 aa, Severe acute respiratory syndrome coronavirus 2
  REGION 1..15: note = Table B: HLA-DQA1*01:02-B1*06:02L HLA-DQA1*01:03-B1*06:01L
GPKKSTNLVKNKCVN

SEQ ID NO: 18755 - protein, 13 aa, Severe acute respiratory syndrome coronavirus 2
  REGION 1..13: note = Table B: HLA-DQA1*01:02-B1*06:02L HLA-DRB1*15:03L
NLVKNKCVNFNFN

SEQ ID NO: 18756 - protein, 13 aa, Severe acute respiratory syndrome coronavirus 2
  REGION 1..13: note = Table B: HLA-DQA1*01:02-B1*06:02L
LVKNKCVNFNFNG

SEQ ID NO: 18757 - protein, 14 aa, Severe acute respiratory syndrome coronavirus 2
  REGION 1..14: note = Table B: HLA-DQA1*01:02-B1*06:02L
VKNKCVNFNFNGLT

SEQ ID NO: 18758 - protein, 11 aa, Severe acute respiratory syndrome coronavirus 2
  REGION 1..11: note = Table B: HLA-DQA1*01:02-B1*06:02L HLA-DQA1*05:05-B1*03:01L
LTGTGVLTESN

SEQ ID NO: 18759 - protein, 13 aa, Severe acute respiratory syndrome coronavirus 2
  REGION 1..13: note = Table B: HLA-DQA1*01:02-B1*06:02L HLA-DRB1*01:02L HLA-DRB1*08:04L HLA-DPA1*03:01-B1*04:02L HLA-DRB1*08:01L HLA-DRB1*12:01L HLA-DPA1*03:01-B1*105:01L HLA-DPA1*01:02-B1*04:01L HLA-DRB1*16:01L
  REGION 1..13: note = CONT. FROM ABOVE: HLA-DQA1*01:03-B1*06:01L HLA-DRB1*15:03L
VLTESNKKFLPFQ

SEQ ID NO: 18760 - protein, 12 aa, Severe acute respiratory syndrome coronavirus 2
  REGION 1..12: note = Table B: HLA-DQA1*01:02-B1*06:02L HLA-DPA1*03:01-B1*04:02L HLA-DPA1*02:01-B1*13:01L HLA-DPA1*03:01-B1*105:01L HLA-DQA1*03:01-B1*03:02L HLA-DPA1*01:02-B1*04:01L HLA-DRB1*16:01L HLA-DQA1*01:03-B1*06:01L
  REGION 1..12: note = CONT. FROM ABOVE: HLA-DQA1*02:01-B1*03:03L
SNKKFLPFQQFG

SEQ ID NO: 18761 - protein, 12 aa, Severe acute respiratory syndrome coronavirus 2
  REGION 1..12: note = Table B: HLA-DQA1*01:02-B1*06:02L HLA-DRB1*01:02L HLA-DPA1*03:01-B1*04:02L HLA-DRB1*14:01L HLA-DRB1*12:01L HLA-DPA1*03:01-B1*105:01L HLA-DRB1*16:01L HLA-DRB1*15:03L
FLPFQQFGRDIA

SEQ ID NO: 18762 - protein, 11 aa, Severe acute respiratory syndrome coronavirus 2
  REGION 1..11: note = Table B: HLA-DQA1*01:02-B1*06:02L HLA-DRB3*02:01L HLA-DPA1*01:03-B1*03:01L HLA-DRB4*01:01L HLA-DPA1*03:01-B1*105:01L HLA-DRB1*15:03L
TTDAVRDPQTL

SEQ ID NO: 18763 - protein, 14 aa, Severe acute respiratory syndrome coronavirus 2
  REGION 1..14: note = Table B: HLA-DQA1*01:02-B1*06:02L HLA-DPA1*02:01-B1*13:01L HLA-DPA1*03:01-B1*105:01L HLA-DQA1*02:01-B1*03:03L
VRDPQTLEILDITP

SEQ ID NO: 18764 - protein, 12 aa, Severe acute respiratory syndrome coronavirus 2
  REGION 1..12: note = Table B: HLA-DQA1*01:02-B1*06:02L HLA-DPA1*03:01-B1*105:01L
LDITPCSFGGVS

SEQ ID NO: 18765 - protein, 14 aa, Severe acute respiratory syndrome coronavirus 2
  REGION 1..14: note = Table B: HLA-DQA1*01:02-B1*06:02L HLA-DQA1*05:01-B1*02:01L
GVSVITPGTNTSNQ

SEQ ID NO: 18766 - protein, 14 aa, Severe acute respiratory syndrome coronavirus 2
  REGION 1..14: note = Table B: HLA-DQA1*01:02-B1*06:02L HLA-DQA1*01-B1*05L HLA-DQA1*05:01-B1*02:01L HLA-DPA1*03:01-B1*105:01L
VLYQDVNCTEVPVA

SEQ ID NO: 18767 - protein, 12 aa, Severe acute respiratory syndrome coronavirus 2
  REGION 1..12: note = Table B: HLA-DQA1*01:02-B1*06:02L
TEVPVAIHADQL

SEQ ID NO: 18768 - protein, 11 aa, Severe acute respiratory syndrome coronavirus 2
  REGION 1..11: note = Table B: HLA-DQA1*01:02-B1*06:02L HLA-DQA1*01:01-B1*05:01L HLA-DQA1*05:05-B1*03:19L HLA-DQA1*05:05-B1*03:01L
TGSNVFQTRAG

SEQ ID NO: 18769 - protein, 13 aa, Severe acute respiratory syndrome coronavirus 2
  REGION 1..13: note = Table B: HLA-DQA1*01:02-B1*06:02L HLA-DRB1*01:02L HLA-DRB1*12:01L HLA-DRB1*16:01L HLA-DQA1*02:01-B1*03:03L HLA-DRB1*15:03L
SNVFQTRAGCLIG

SEQ ID NO: 18770 - protein, 12 aa, Severe acute respiratory syndrome coronavirus 2
  REGION 1..12: note = Table B: HLA-DQA1*01:02-B1*06:02L HLA-DQA1*01:03-B1*06:01L
FQTRAGCLIGAE

SEQ ID NO: 18771 - protein, 11 aa, Severe acute respiratory syndrome coronavirus 2
  REGION 1..11: note = Table B: HLA-DQA1*01:02-B1*06:02L HLA-DQA1*01:03-B1*06:01L HLA-DQA1*02:01-B1*03:03L
TRAGCLIGAEH

SEQ ID NO: 18772 - protein, 12 aa, Severe acute respiratory syndrome coronavirus 2
  REGION 1..12: note = Table B: HLA-DQA1*01:02-B1*06:02L
RAGCLIGAEHVN

SEQ ID NO: 18773 - protein, 12 aa, Severe acute respiratory syndrome coronavirus 2
  REGION 1..12: note = Table B: HLA-DQA1*01:02-B1*06:02L
AGCLIGAEHVNN

SEQ ID NO: 18774 - protein, 13 aa, Severe acute respiratory syndrome coronavirus 2
  REGION 1..13: note = Table B: HLA-DQA1*01:02-B1*06:02L HLA-DQA1*01-B1*05L HLA-DQA1*03:01-B1*03:02L HLA-DQA1*01:03-B1*06:01L
HVNNSYECDIPIG

SEQ ID NO: 18775 - protein, 11 aa, Severe acute respiratory syndrome coronavirus 2
  REGION 1..11: note = Table B: HLA-DQA1*01:02-B1*06:02L HLA-DQA1*01:03-B1*06:01L
SYECDIPIGAG

SEQ ID NO: 18776 - protein, 13 aa, Severe acute respiratory syndrome coronavirus 2
  REGION 1..13: note = Table B: HLA-DQA1*01:02-B1*06:02L HLA-DQA1*05:05-B1*03:01L
PIGAGICASYQTQ

SEQ ID NO: 18777 - protein, 12 aa, Severe acute respiratory syndrome coronavirus 2
  REGION 1..12: note = Table B: HLA-DQA1*01:02-B1*06:02L HLA-DQA1*01:03-B1*06:01L
AGICASYQTQTN

SEQ ID NO: 18778 - protein, 14 aa, Severe acute respiratory syndrome coronavirus 2
  REGION 1..14: note = Table B: HLA-DQA1*01:02-B1*06:02L
GICASYQTQTNSPR

SEQ ID NO: 18779 - protein, 12 aa, Severe acute respiratory syndrome coronavirus 2
  REGION 1..12: note = Table B: HLA-DQA1*01:02-B1*06:02L HLA-DRB3*01:01L HLA-DPA1*03:01-B1*105:01L HLA-DPA1*01:02-B1*04:01L HLA-DRB1*07:01L HLA-DQA1*01:03-B1*06:01L HLA-DRB1*15:03L
ASYQTQTNSPRR

SEQ ID NO: 18780 - protein, 12 aa, Severe acute respiratory syndrome coronavirus 2
  REGION 1..12: note = Table B: HLA-DQA1*01:02-B1*06:02L HLA-DPA1*03:01-B1*105:01L HLA-DQA1*05:05-B1*03:01L HLA-DQA1*02:01-B1*03:03L
VASQSIIAYTMS

SEQ ID NO: 18781 - protein, 12 aa, Severe acute respiratory syndrome coronavirus 2
  REGION 1..12: note = Table B: HLA-DQA1*01:02-B1*06:02L HLA-DQA1*05:05-B1*03:19L HLA-DQA1*05:05-B1*03:01L
IAYTMSLGAENS

SEQ ID NO: 18782 - protein, 13 aa, Severe acute respiratory syndrome coronavirus 2
  REGION 1..13: note = Table B: HLA-DQA1*01:02-B1*06:02L HLA-DPA1*03:01-B1*105:01L
AYTMSLGAENSVA

SEQ ID NO: 18783 - protein, 14 aa, Severe acute respiratory syndrome coronavirus 2
  REGION 1..14: note = Table B: HLA-DQA1*01:02-B1*06:02L
IAIPTNFTISVTTE

SEQ ID NO: 18784 - protein, 11 aa, Severe acute respiratory syndrome coronavirus 2
  REGION 1..11: note = Table B: HLA-DQA1*01:02-B1*06:02L HLA-DPA1*01:03-B1*03:01L HLA-DQA1*05:01-B1*02:01L HLA-DQA1*02:01-B1*03:03L
MTKTSVDCTMY

SEQ ID NO: 18785 - protein, 14 aa, Severe acute respiratory syndrome coronavirus 2
  REGION 1..14: note = Table B: HLA-DQA1*01:02-B1*06:02L
TKTSVDCTMYICGD

SEQ ID NO: 18786 - protein, 12 aa, Severe acute respiratory syndrome coronavirus 2
  REGION 1..12: note = Table B: HLA-DQA1*01:02-B1*06:02L
SVDCTMYICGDS

SEQ ID NO: 18787 - protein, 12 aa, Severe acute respiratory syndrome coronavirus 2
  REGION 1..12: note = Table B: HLA-DQA1*01:02-B1*06:02L HLA-DPA1*03:01-B1*04:02L HLA-DPA1*01:03-B1*04:02L
LLQYGSFCTQLN

SEQ ID NO: 18788 - protein, 10 aa, Severe acute respiratory syndrome coronavirus 2
  REGION 1..10: note = Table B: HLA-DQA1*01:02-B1*06:02L HLA-DQA1*01:03-B1*06:01L
SFCTQLNRAL

SEQ ID NO: 18789 - protein, 12 aa, Severe acute respiratory syndrome coronavirus 2
  REGION 1..12: note = Table B: HLA-DQA1*01:02-B1*06:02L HLA-DRB1*01:02L HLA-DRB1*08:04L HLA-DRB1*12:02L HLA-DPA1*03:01-B1*105:01L HLA-DQA1*01:03-B1*06:01L HLA-DRB1*08:03L HLA-DRB1*15:03L
GIAVEQDKNTQE

SEQ ID NO: 18790 - protein, 12 aa, Severe acute respiratory syndrome coronavirus 2
  REGION 1..12: note = Table B: HLA-DQA1*01:02-B1*06:02L HLA-DRB1*01:02L HLA-DRB1*08:04L HLA-DPA1*01:03-B1*03:01L HLA-DRB1*14:02L HLA-DRB3*01:01L HLA-DPA1*02:01-B1*13:01L HLA-DPA1*03:01-B1*105:01L HLA-DQA1*05:05-B1*03:01L
IAVEQDKNTQEV

SEQ ID NO: 18791 - protein, 12 aa, Severe acute respiratory syndrome coronavirus 2
  REGION 1..12: note = Table B: HLA-DQA1*01:02-B1*06:02L HLA-DQA1*01-B1*05L HLA-DQA1*05:01-B1*02:01L HLA-DQA1*03:01-B1*03:02L
FNKVTLADAGFI

SEQ ID NO: 18792 - protein, 14 aa, Severe acute respiratory syndrome coronavirus 2
  REGION 1..14: note = Table B: HLA-DQA1*01:02-B1*06:02L
ADAGFIKQYGDCLG

SEQ ID NO: 18793 - protein, 14 aa, Severe acute respiratory syndrome coronavirus 2
  REGION 1..14: note = Table B: HLA-DQA1*01:02-B1*06:02L HLA-DRB1*04:08L
DAGFIKQYGDCLGD

SEQ ID NO: 18794 - protein, 12 aa, Severe acute respiratory syndrome coronavirus 2
  REGION 1..12: note = Table B: HLA-DQA1*01:02-B1*06:02L
YGDCLGDIAARD

SEQ ID NO: 18795 - protein, 13 aa, Severe acute respiratory syndrome coronavirus 2
  REGION 1..13: note = Table B: HLA-DQA1*01:02-B1*06:02L HLA-DQA1*01:03-B1*06:01L
LGDIAARDLICAQ

SEQ ID NO: 18796 - protein, 12 aa, Severe acute respiratory syndrome coronavirus 2
  REGION 1..12: note = Table B: HLA-DQA1*01:02-B1*06:02L HLA-DQA1*01:03-B1*06:01L HLA-DQA1*02:01-B1*03:03L
DIAARDLICAQK

SEQ ID NO: 18797 - protein, 12 aa, Severe acute respiratory syndrome coronavirus 2
  REGION 1..12: note = Table B: HLA-DQA1*01:02-B1*06:02L HLA-DRB1*14:01L HLA-DRB1*08:01L HLA-DPA1*01:03-B1*04:01L HLA-DRB1*12:01L HLA-DRB1*16:01L HLA-DRB1*04:08L
RDLICAQKFNGL

SEQ ID NO: 18798 - protein, 13 aa, Severe acute respiratory syndrome coronavirus 2
  REGION 1..13: note = Table B: HLA-DQA1*01:02-B1*06:02L
KFNGLTVLPPLLT

SEQ ID NO: 18799 - protein, 13 aa, Severe acute respiratory syndrome coronavirus 2
  REGION 1..13: note = Table B: HLA-DQA1*01:02-B1*06:02L HLA-DRB1*01:02L HLA-DPA1*03:01-B1*04:02L HLA-DRB1*14:01L HLA-DQA1*01:03-B1*06:01L
TDEMIAQYTSALL

SEQ ID NO: 18800 - protein, 12 aa, Severe acute respiratory syndrome coronavirus 2
  REGION 1..12: note = Table B: HLA-DQA1*01:02-B1*06:02L
MIAQYTSALLAG

SEQ ID NO: 18801 - protein, 11 aa, Severe acute respiratory syndrome coronavirus 2
  REGION 1..11: note = Table B: HLA-DQA1*01:02-B1*06:02L
TITSGWTFGAG

SEQ ID NO: 18802 - protein, 11 aa, Severe acute respiratory syndrome coronavirus 2
  REGION 1..11: note = Table B: HLA-DQA1*01:02-B1*06:02L HLA-DQA1*05:05-B1*03:19L HLA-DQA1*05:05-B1*03:01L HLA-DQA1*01:03-B1*06:01L
FGAGAALQIPF

SEQ ID NO: 18803 - protein, 11 aa, Severe acute respiratory syndrome coronavirus 2
  REGION 1..11: note = Table B: HLA-DQA1*01:02-B1*06:02L
GAGAALQIPFA

SEQ ID NO: 18804 - protein, 12 aa, Severe acute respiratory syndrome coronavirus 2
  REGION 1..12: note = Table B: HLA-DQA1*01:02-B1*06:02L HLA-DQA1*05:01-B1*02:01L HLA-DPA1*03:01-B1*105:01L
AGAALQIPFAMQ

SEQ ID NO: 18805 - protein, 10 aa, Severe acute respiratory syndrome coronavirus 2
  REGION 1..10: note = Table B: HLA-DQA1*01:02-B1*06:02L HLA-DPA1*01:03-B1*03:01L HLA-DRB1*03:01L HLA-DRB1*11:02L HLA-DQA1*05:05-B1*03:19L HLA-DQA1*05:01-B1*02:01L HLA-DRB4*01:01L HLA-DPA1*01:03-B1*04:01L HLA-DPA1*01:03-B1*104:01L
  REGION 1..10: note = CONT. FROM ABOVE: HLA-DRB1*16:01L
QIPFAMQMAY

SEQ ID NO: 18806 - protein, 11 aa, Severe acute respiratory syndrome coronavirus 2
  REGION 1..11: note = Table B: HLA-DQA1*01:02-B1*06:02L HLA-DRB1*01:02L HLA-DRB1*12:01L HLA-DPA1*03:01-B1*105:01L HLA-DRB1*16:01L HLA-DQA1*02:01-B1*03:03L HLA-DRB1*15:03L
IPFAMQMAYRF

SEQ ID NO: 18807 - protein, 12 aa, Severe acute respiratory syndrome coronavirus 2
  REGION 1..12: note = Table B: HLA-DQA1*01:02-B1*06:02L HLA-DRB1*08:04L HLA-DRB1*14:01L
AMQMAYRFNGIG

SEQ ID NO: 18808 - protein, 12 aa, Severe acute respiratory syndrome coronavirus 2
  REGION 1..12: note = Table B: HLA-DQA1*01:02-B1*06:02L HLA-DRB1*01:02L HLA-DRB1*15:03L
YRFNGIGVTQNV

SEQ ID NO: 18809 - protein, 14 aa, Severe acute respiratory syndrome coronavirus 2
  REGION 1..14: note = Table B: HLA-DQA1*01:02-B1*06:02L HLA-DQA1*05:05-B1*03:19L HLA-DQA1*05:05-B1*03:01L HLA-DQA1*01:03-B1*06:01L HLA-DQA1*02:01-B1*03:03L
GKIQDSLSSTASAL

SEQ ID NO: 18810 - protein, 11 aa, Severe acute respiratory syndrome coronavirus 2
  REGION 1..11: note = Table B: HLA-DQA1*01:02-B1*06:02L HLA-DPA1*03:01-B1*105:01L
QNAQALNTLVK

SEQ ID NO: 18811 - protein, 11 aa, Severe acute respiratory syndrome coronavirus 2
  REGION 1..11: note = Table B: HLA-DQA1*01:02-B1*06:02L HLA-DPA1*03:01-B1*04:02L HLA-DRB1*14:01L HLA-DQA1*05:05-B1*03:19L HLA-DQA1*05:01-B1*02:01L HLA-DQA1*05:05-B1*03:116L HLA-DPA1*01:02-B1*04:01L HLA-DRB1*15:03L
AQALNTLVKQL

SEQ ID NO: 18812 - protein, 10 aa, Severe acute respiratory syndrome coronavirus 2
  REGION 1..10: note = Table B: HLA-DQA1*01:02-B1*06:02L HLA-DQA1*01:03-B1*06:01L HLA-DQA1*02:01-B1*03:03L
TLVKQLSSNF

SEQ ID NO: 18813 - protein, 14 aa, Severe acute respiratory syndrome coronavirus 2
  REGION 1..14: note = Table B: HLA-DQA1*01:02-B1*06:02L
KQLSSNFGAISSVL

SEQ ID NO: 18814 - protein, 12 aa, Severe acute respiratory syndrome coronavirus 2
  REGION 1..12: note = Table B: HLA-DQA1*01:02-B1*06:02L HLA-DQA1*05:05-B1*03:19L HLA-DQA1*05:05-B1*03:01L HLA-DQA1*01:03-B1*06:01L
NFGAISSVLNDI

SEQ ID NO: 18815 - protein, 12 aa, Severe acute respiratory syndrome coronavirus 2
  REGION 1..12: note = Table B: HLA-DQA1*01:02-B1*06:02L HLA-DQA1*03:01-B1*03:02L HLA-DQA1*01:03-B1*06:01L
LNDILSRLDKVE

SEQ ID NO: 18816 - protein, 13 aa, Severe acute respiratory syndrome coronavirus 2
  REGION 1..13: note = Table B: HLA-DQA1*01:02-B1*06:02L
SRLDKVEAEVQID

SEQ ID NO: 18817 - protein, 11 aa, Severe acute respiratory syndrome coronavirus 2
  REGION 1..11: note = Table B: HLA-DQA1*01:02-B1*06:02L
EVQIDRLITGR

SEQ ID NO: 18818 - protein, 10 aa, Severe acute respiratory syndrome coronavirus 2
  REGION 1..10: note = Table B: HLA-DQA1*01:02-B1*06:02L HLA-DQA1*02:01-B1*03:03L
TGRLQSLQTY

SEQ ID NO: 18819 - protein, 12 aa, Severe acute respiratory syndrome coronavirus 2
  REGION 1..12: note = Table B: HLA-DQA1*01:02-B1*06:02L HLA-DRB1*01:02L HLA-DQA1*02:01-B1*03:03L
RLQSLQTYVTQQ

SEQ ID NO: 18820 - protein, 12 aa, Severe acute respiratory syndrome coronavirus 2
  REGION 1..12: note = Table B: HLA-DQA1*01:02-B1*06:02L HLA-DPA1*03:01-B1*04:02L HLA-DPA1*01:03-B1*04:02L
ANLAATKMSECV

SEQ ID NO: 18821 - protein, 12 aa, Severe acute respiratory syndrome coronavirus 2
  REGION 1..12: note = Table B: HLA-DQA1*01:02-B1*06:02L HLA-DPA1*03:01-B1*105:01L
NLAATKMSECVL

SEQ ID NO: 18822 - protein, 12 aa, Severe acute respiratory syndrome coronavirus 2
  REGION 1..12: note = Table B: HLA-DQA1*01:02-B1*06:02L HLA-DQA1*05:05-B1*03:19L HLA-DPA1*03:01-B1*105:01L HLA-DQA1*05:05-B1*03:01L HLA-DQA1*02:01-B1*03:03L
LAATKMSECVLG

SEQ ID NO: 18823 - protein, 12 aa, Severe acute respiratory syndrome coronavirus 2
  REGION 1..12: note = Table B: HLA-DQA1*01:02-B1*06:02L HLA-DQA1*01:03-B1*06:01L
ATKMSECVLGQS

SEQ ID NO: 18824 - protein, 10 aa, Severe acute respiratory syndrome coronavirus 2
  REGION 1..10: note = Table B: HLA-DQA1*01:02-B1*06:02L HLA-DQA1*01:03-B1*06:01L
MSECVLGQSK

SEQ ID NO: 18825 - protein, 10 aa, Severe acute respiratory syndrome coronavirus 2
  REGION 1..10: note = Table B: HLA-DQA1*01:02-B1*06:02L HLA-DQA1*03:01-B1*03:02L HLA-DQA1*01:03-B1*06:01L
SECVLGQSKR

SEQ ID NO: 18826 - protein, 15 aa, Severe acute respiratory syndrome coronavirus 2
  REGION 1..15: note = Table B: HLA-DQA1*01:02-B1*06:02L HLA-DRB1*01:02L HLA-DRB1*16:01L HLA-DRB1*04:08L
SKRVDFCGKGYHLMS

SEQ ID NO: 18827 - protein, 15 aa, Severe acute respiratory syndrome coronavirus 2
  REGION 1..15: note = Table B: HLA-DQA1*01:02-B1*06:02L
VDFCGKGYHLMSFPQ

SEQ ID NO: 18828 - protein, 12 aa, Severe acute respiratory syndrome coronavirus 2
  REGION 1..12: note = Table B: HLA-DQA1*01:02-B1*06:02L
HLMSFPQSAPHG

SEQ ID NO: 18829 - protein, 11 aa, Severe acute respiratory syndrome coronavirus 2
  REGION 1..11: note = Table B: HLA-DQA1*01:02-B1*06:02L HLA-DPA1*03:01-B1*04:02L HLA-DQA1*01-B1*05L HLA-DPA1*03:01-B1*105:01L
FLHVTYVPAQE

SEQ ID NO: 18830 - protein, 13 aa, Severe acute respiratory syndrome coronavirus 2
  REGION 1..13: note = Table B: HLA-DQA1*01:02-B1*06:02L HLA-DPA1*02:01-B1*13:01L
QEKNFTTAPAICH

SEQ ID NO: 18831 - protein, 10 aa, Severe acute respiratory syndrome coronavirus 2
  REGION 1..10: note = Table B: HLA-DQA1*01:02-B1*06:02L HLA-DQA1*05:05-B1*03:01L HLA-DQA1*01:03-B1*06:01L HLA-DQA1*02:01-B1*03:03L
FTTAPAICHD

SEQ ID NO: 18832 - protein, 12 aa, Severe acute respiratory syndrome coronavirus 2
  REGION 1..12: note = Table B: HLA-DQA1*01:02-B1*06:02L HLA-DQA1*02:01-B1*03:03L
TAPAICHDGKAH

SEQ ID NO: 18833 - protein, 13 aa, Severe acute respiratory syndrome coronavirus 2
  REGION 1..13: note = Table B: HLA-DQA1*01:02-B1*06:02L
ICHDGKAHFPREG

SEQ ID NO: 18834 - protein, 10 aa, Severe acute respiratory syndrome coronavirus 2
  REGION 1..10: note = Table B: HLA-DQA1*01:02-B1*06:02L HLA-DQA1*02:01-B1*03:03L
KAHFPREGVF

SEQ ID NO: 18835 - protein, 12 aa, Severe acute respiratory syndrome coronavirus 2
  REGION 1..12: note = Table B: HLA-DQA1*01:02-B1*06:02L HLA-DRB1*14:01L HLA-DPA1*03:01-B1*105:01L HLA-DQA1*01:03-B1*06:01L HLA-DRB1*15:03L
FVSNGTHWFVTQ

SEQ ID NO: 18836 - protein, 12 aa, Severe acute respiratory syndrome coronavirus 2
  REGION 1..12: note = Table B: HLA-DQA1*01:02-B1*06:02L HLA-DQA1*01:03-B1*06:01L HLA-DQA1*02:01-B1*03:03L
VSNGTHWFVTQR

SEQ ID NO: 18837 - protein, 12 aa, Severe acute respiratory syndrome coronavirus 2
  REGION 1..12: note = Table B: HLA-DQA1*01:02-B1*06:02L HLA-DQA1*01:03-B1*06:01L HLA-DQA1*02:01-B1*03:03L
SNGTHWFVTQRN

SEQ ID NO: 18838 - protein, 10 aa, Severe acute respiratory syndrome coronavirus 2
  REGION 1..10: note = Table B: HLA-DQA1*01:02-B1*06:02L HLA-DQA1*01:03-B1*06:01L HLA-DQA1*02:01-B1*03:03L
THWFVTQRNF

SEQ ID NO: 18839 - protein, 10 aa, Severe acute respiratory syndrome coronavirus 2
  REGION 1..10: note = Table B: HLA-DQA1*01:02-B1*06:02L HLA-DRB1*03:01L HLA-DQA1*05:05-B1*03:19L HLA-DQA1*05:01-B1*02:01L HLA-DPA1*01:03-B1*04:01L HLA-DPA1*02:01-B1*13:01L HLA-DRB1*16:01L HLA-DQA1*01:03-B1*06:01L
  REGION 1..10: note = CONT. FROM ABOVE: HLA-DQA1*02:01-B1*03:03L
HWFVTQRNFY

SEQ ID NO: 18840 - protein, 11 aa, Severe acute respiratory syndrome coronavirus 2
  REGION 1..11: note = Table B: HLA-DQA1*01:02-B1*06:02L HLA-DQA1*01:03-B1*06:01L
FVSGNCDVVIG

SEQ ID NO: 18841 - protein, 12 aa, Severe acute respiratory syndrome coronavirus 2
  REGION 1..12: note = Table B: HLA-DQA1*01:02-B1*06:02L HLA-DQA1*01:03-B1*06:01L
SGNCDVVIGIVN

SEQ ID NO: 18842 - protein, 12 aa, Severe acute respiratory syndrome coronavirus 2
  REGION 1..12: note = Table B: HLA-DQA1*01:02-B1*06:02L
GNCDVVIGIVNN

SEQ ID NO: 18843 - protein, 14 aa, Severe acute respiratory syndrome coronavirus 2
  REGION 1..14: note = Table B: HLA-DQA1*01:02-B1*06:02L
IGIVNNTVYDPLQP

SEQ ID NO: 18844 - protein, 10 aa, Severe acute respiratory syndrome coronavirus 2
  REGION 1..10: note = Table B: HLA-DQA1*01:02-B1*06:02L HLA-DPA1*02:01-B1*13:01L HLA-DQA1*01:03-B1*06:01L HLA-DQA1*02:01-B1*03:03L
SFKEELDKYF

SEQ ID NO: 18845 - protein, 12 aa, Severe acute respiratory syndrome coronavirus 2
  REGION 1..12: note = Table B: HLA-DQA1*01:02-B1*06:02L HLA-DPA1*03:01-B1*105:01L HLA-DQA1*01:03-B1*06:01L HLA-DQA1*02:01-B1*03:03L
LNESLIDLQELG

SEQ ID NO: 18846 - protein, 10 aa, Severe acute respiratory syndrome coronavirus 2
  REGION 1..10: note = Table B: HLA-DQA1*01:02-B1*06:02L HLA-DPA1*02:01-B1*13:01L HLA-DQA1*01:03-B1*06:01L
KYEQYIKWPW

SEQ ID NO: 18847 - protein, 10 aa, Severe acute respiratory syndrome coronavirus 2
  REGION 1..10: note = Table B: HLA-DQA1*01:02-B1*06:02L HLA-DQA1*01:03-B1*06:01L
FIAGLIAIVM

SEQ ID NO: 18848 - protein, 14 aa, Severe acute respiratory syndrome coronavirus 2
  REGION 1..14: note = Table B: HLA-DQA1*01:02-B1*06:02L
EDDSEPVLKGVKLH

SEQ ID NO: 18849 - protein, 11 aa, Severe acute respiratory syndrome coronavirus 2
  REGION 1..11: note = Table B: HLA-DQA1*01:02-B1*06:02L
FTIGTVTLKQG

SEQ ID NO: 18850 - protein, 11 aa, Severe acute respiratory syndrome coronavirus 2
  REGION 1..11: note = Table B: HLA-DQA1*01:02-B1*06:02L
GTVTLKQGEIK

SEQ ID NO: 18851 - protein, 13 aa, Severe acute respiratory syndrome coronavirus 2
  REGION 1..13: note = Table B: HLA-DQA1*01:02-B1*06:02L
TVTLKQGEIKDAT

SEQ ID NO: 18852 - protein, 13 aa, Severe acute respiratory syndrome coronavirus 2
  REGION 1..13: note = Table B: HLA-DQA1*01:02-B1*06:02L
VTLKQGEIKDATP

SEQ ID NO: 18853 - protein, 13 aa, Severe acute respiratory syndrome coronavirus 2
  REGION 1..13: note = Table B: HLA-DQA1*01:02-B1*06:02L
IKDATPSDFVRAT

SEQ ID NO: 18854 - protein, 13 aa, Severe acute respiratory syndrome coronavirus 2
  REGION 1..13: note = Table B: HLA-DQA1*01:02-B1*06:02L HLA-DQA1*05:01-B1*02:01L
DATPSDFVRATAT

SEQ ID NO: 18855 - protein, 11 aa, Severe acute respiratory syndrome coronavirus 2
  REGION 1..11: note = Table B: HLA-DQA1*01:02-B1*06:02L
ATIPIQASLPF

SEQ ID NO: 18856 - protein, 11 aa, Severe acute respiratory syndrome coronavirus 2
  REGION 1..11: note = Table B: HLA-DQA1*01:02-B1*06:02L HLA-DPA1*03:01-B1*105:01L HLA-DQA1*01:03-B1*06:01L
IVGVALLAVFQ

SEQ ID NO: 18857 - protein, 13 aa, Severe acute respiratory syndrome coronavirus 2
  REGION 1..13: note = Table B: HLA-DQA1*01:02-B1*06:02L
VGVALLAVFQSAS

SEQ ID NO: 18858 - protein, 11 aa, Severe acute respiratory syndrome coronavirus 2
  REGION 1..11: note = Table B: HLA-DQA1*01:02-B1*06:02L HLA-DPA1*01:03-B1*03:01L HLA-DRB1*11:04L HLA-DRB1*11:01L HLA-DRB5*01:01L HLA-DPA1*01:03-B1*04:01L HLA-DRB1*04:10L HLA-DPA1*02:01-B1*13:01L HLA-DRB1*08:03L
AVFQSASKIIT

SEQ ID NO: 18859 - protein, 11 aa, Severe acute respiratory syndrome coronavirus 2
  REGION 1..11: note = Table B: HLA-DQA1*01:02-B1*06:02L HLA-DRB1*11:04L HLA-DRB1*11:01L HLA-DRB1*16:01L
IITLKKRWQLA

SEQ ID NO: 18860 - protein, 14 aa, Severe acute respiratory syndrome coronavirus 2
  REGION 1..14: note = Table B: HLA-DQA1*01:02-B1*06:02L
LALSKGVHFVCNLL

SEQ ID NO: 18861 - protein, 10 aa, Severe acute respiratory syndrome coronavirus 2
  REGION 1..10: note = Table B: HLA-DQA1*01:02-B1*06:02L HLA-DPA1*03:01-B1*04:02L HLA-DPA1*03:01-B1*105:01L HLA-DPA1*01:02-B1*04:01L HLA-DQA1*01:03-B1*06:01L HLA-DRB1*15:03L
TVYSHLLLVA

SEQ ID NO: 18862 - protein, 11 aa, Severe acute respiratory syndrome coronavirus 2
  REGION 1..11: note = Table B: HLA-DQA1*01:02-B1*06:02L HLA-DPA1*01:03-B1*04:01L HLA-DRB1*16:01L HLA-DRB1*04:08L
VYSHLLLVAAG

SEQ ID NO: 18863 - protein, 12 aa, Severe acute respiratory syndrome coronavirus 2
  REGION 1..12: note = Table B: HLA-DQA1*01:02-B1*06:02L HLA-DPA1*03:01-B1*105:01L HLA-DQA1*01:03-B1*06:01L
YSHLLLVAAGLE

SEQ ID NO: 18864 - protein, 10 aa, Severe acute respiratory syndrome coronavirus 2
  REGION 1..10: note = Table B: HLA-DQA1*01:02-B1*06:02L HLA-DPA1*01:03-B1*03:01L HLA-DQA1*05:05-B1*03:19L HLA-DQA1*05:01-B1*02:01L HLA-DPA1*01:03-B1*104:01L
AAGLEAPFLY

SEQ ID NO: 18865 - protein, 10 aa, Severe acute respiratory syndrome coronavirus 2
  REGION 1..10: note = Table B: HLA-DQA1*01:02-B1*06:02L HLA-DPA1*03:01-B1*04:02L HLA-DQA1*01-B1*05L HLA-DQA1*05:05-B1*03:19L HLA-DQA1*05:01-B1*02:01L HLA-DPA1*01:03-B1*04:01L HLA-DPA1*03:01-B1*105:01L HLA-DPA1*01:02-B1*04:01L
  REGION 1..10: note = CONT. FROM ABOVE: HLA-DRB1*16:01L HLA-DQA1*01:03-B1*06:01L HLA-D QA1*02:01-B1*03:03L HLA-DRB1*15:03L
LQSINFVRII

SEQ ID NO: 18866 - protein, 12 aa, Severe acute respiratory syndrome coronavirus 2
  REGION 1..12: note = Table B: HLA-DQA1*01:02-B1*06:02L HLA-DQA1*02:01-B1*03:03L
RSKNPLLYDANY

SEQ ID NO: 18867 - protein, 10 aa, Severe acute respiratory syndrome coronavirus 2
  REGION 1..10: note = Table B: HLA-DQA1*01:02-B1*06:02L HLA-DPA1*03:01-B1*105:01L
NPLLYDANYF

SEQ ID NO: 18868 - protein, 12 aa, Severe acute respiratory syndrome coronavirus 2
  REGION 1..12: note = Table B: HLA-DQA1*01:02-B1*06:02L HLA-DPA1*01:03-B1*04:01L HLA-DPA1*01:03-B1*04:02L HLA-DPA1*03:01-B1*105:01L HLA-DRB1*16:01L HLA-DQA1*01:03-B1*06:01L HLA-DRB1*04:08L
YDANYFLCWHTN

SEQ ID NO: 18869 - protein, 13 aa, Severe acute respiratory syndrome coronavirus 2
  REGION 1..13: note = Table B: HLA-DQA1*01:02-B1*06:02L HLA-DPA1*03:01-B1*105:01L HLA-DQA1*01:03-B1*06:01L
WHTNCYDYCIPYN

SEQ ID NO: 18870 - protein, 11 aa, Severe acute respiratory syndrome coronavirus 2
  REGION 1..11: note = Table B: HLA-DQA1*01:02-B1*06:02L HLA-DPA1*03:01-B1*105:01L HLA-DQA1*05:05-B1*03:01L HLA-DQA1*01:03-B1*06:01L
YDYCIPYNSVT

SEQ ID NO: 18871 - protein, 12 aa, Severe acute respiratory syndrome coronavirus 2
  REGION 1..12: note = Table B: HLA-DQA1*01:02-B1*06:02L HLA-DQA1*05:05-B1*03:19L HLA-DQA1*05:05-B1*03:01L HLA-DQA1*02:01-B1*03:03L
NSVTSSIVITSG

SEQ ID NO: 18872 - protein, 12 aa, Severe acute respiratory syndrome coronavirus 2
  REGION 1..12: note = Table B: HLA-DQA1*01:02-B1*06:02L HLA-DRB1*08:01L HLA-DQA1*02:01-B1*03:03L
GGYTEKWESGVK

SEQ ID NO: 18873 - protein, 12 aa, Severe acute respiratory syndrome coronavirus 2
  REGION 1..12: note = Table B: HLA-DQA1*01:02-B1*06:02L HLA-DRB1*01:02L HLA-DRB1*08:01L HLA-DPA1*03:01-B1*105:01L HLA-DRB1*16:01L HLA-DQA1*01:03-B1*06:01L
GYTEKWESGVKD

SEQ ID NO: 18874 - protein, 14 aa, Severe acute respiratory syndrome coronavirus 2
  REGION 1..14: note = Table B: HLA-DQA1*01:02-B1*06:02L
TEKWESGVKDCVVL

SEQ ID NO: 18875 - protein, 12 aa, Severe acute respiratory syndrome coronavirus 2
  REGION 1..12: note = Table B: HLA-DQA1*01:02-B1*06:02L
WESGVKDCVVLH

SEQ ID NO: 18876 - protein, 10 aa, Severe acute respiratory syndrome coronavirus 2
  REGION 1..10: note = Table B: HLA-DQA1*01:02-B1*06:02L HLA-DQA1*05:05-B1*03:19L HLA-DQA1*01:03-B1*06:01L HLA-DQA1*02:01-B1*03:03L
VKDCVVLHSY

SEQ ID NO: 18877 - protein, 10 aa, Severe acute respiratory syndrome coronavirus 2
  REGION 1..10: note = Table B: HLA-DQA1*01:02-B1*06:02L HLA-DPA1*01:03-B1*03:01L HLA-DQA1*01-B1*05L HLA-DQA1*05:05-B1*03:19L HLA-DQA1*05:01-B1*02:01L HLA-DPA1*01:03-B1*104:01L HLA-DQA1*02:01-B1*03:03L
VLHSYFTSDY

SEQ ID NO: 18878 - protein, 10 aa, Severe acute respiratory syndrome coronavirus 2
  REGION 1..10: note = Table B: HLA-DQA1*01:02-B1*06:02L HLA-DRB1*08:77L HLA-DPA1*01:03-B1*03:01L HLA-DPA1*03:01-B1*04:02L HLA-DRB1*03:01L HLA-DRB1*11:02L HLA-DRB1*14:02L HLA-DQA1*01-B1*05L HLA-DQA1*05:05-B1*03:19M
  REGION 1..10: note = CONT. FROM ABOVE: HLA-DQA1*05:01-B1*02:01L HLA-DRB4*01:01L HLA-D PA1*01:03-B1*04:01L HLA-DQA1*05:05-B1*03:116L HLA-DPA1*01:03-B1* 04:02L HLA-DPA1*02:01-B1*13:01L HLA-DPA1*03:01-B1*105:01L HLA-DP A1*01:03-B1*104:01L HLA-DRB1*10:01L HLA-DRB1*16:01L
  REGION 1..10: note = CONT. FROM ABOVE: HLA-DQA1*01:03-B1*06:01L HLA-DRB1*15:03L
YFTSDYYQLY

SEQ ID NO: 18879 - protein, 13 aa, Severe acute respiratory syndrome coronavirus 2
  REGION 1..13: note = Table B: HLA-DQA1*01:02-B1*06:02L HLA-DQA1*01-B1*05L
LYSTQLSTDTGVE

SEQ ID NO: 18880 - protein, 13 aa, Severe acute respiratory syndrome coronavirus 2
  REGION 1..13: note = Table B: HLA-DQA1*01:02-B1*06:02L
YSTQLSTDTGVEH

SEQ ID NO: 18881 - protein, 13 aa, Severe acute respiratory syndrome coronavirus 2
  REGION 1..13: note = Table B: HLA-DQA1*01:02-B1*06:02L HLA-DRB1*01:02L HLA-DRB1*08:04L HLA-DRB1*08:77L HLA-DPA1*01:03-B1*03:01L HLA-DRB1*03:01L HLA-DRB1*14:01L HLA-DRB3*01:01L HLA-DRB1*04:08L
TQLSTDTGVEHVT

SEQ ID NO: 18882 - protein, 10 aa, Severe acute respiratory syndrome coronavirus 2
  REGION 1..10: note = Table B: HLA-DQA1*01:02-B1*06:02L HLA-DPA1*01:03-B1*03:01L HLA-DRB1*11:02L HLA-DQA1*05:05-B1*03:19M HLA-DQA1*05:01-B1*02:01L HLA-DPA1*01:03-B1*104:01L HLA-DRB1*16:01L
GVEHVTFFIY

SEQ ID NO: 18883 - protein, 14 aa, Severe acute respiratory syndrome coronavirus 2
  REGION 1..14: note = Table B: HLA-DQA1*01:02-B1*06:02L HLA-DRB1*01:02L HLA-DRB1*08:04L HLA-DRB1*14:01L HLA-DRB1*08:01L HLA-DQA1*01-B1*05L HLA-DPA1*01:03-B1*04:02L HLA-DRB1*12:01L HLA-DPA1*02:01-B1*13:01L HLA-DRB1*16:01L
  REGION 1..14: note = CONT. FROM ABOVE: HLA-DQA1*01:03-B1*06:01L HLA-DRB1*04:08L
VEHVTFFIYNKIVD

SEQ ID NO: 18884 - protein, 13 aa, Severe acute respiratory syndrome coronavirus 2
  REGION 1..13: note = Table B: HLA-DQA1*01:02-B1*06:02L HLA-DPA1*01:03-B1*04:01L HLA-DPA1*01:03-B1*04:02L HLA-DPA1*02:01-B1*13:01L HLA-DRB1*16:01L HLA-DRB1*15:03L
VTFFIYNKIVDEP

SEQ ID NO: 18885 - protein, 12 aa, Severe acute respiratory syndrome coronavirus 2
  REGION 1..12: note = Table B: HLA-DQA1*01:02-B1*06:02L HLA-DQA1*03:01-B1*03:02L HLA-DQA1*01:03-B1*06:01L HLA-DQA1*02:01-B1*03:03L
EPEEHVQIHTID

SEQ ID NO: 18886 - protein, 12 aa, Severe acute respiratory syndrome coronavirus 2
  REGION 1..12: note = Table B: HLA-DQA1*01:02-B1*06:02L HLA-DQA1*01:03-B1*06:01L HLA-DQA1*02:01-B1*03:03L
PEEHVQIHTIDG

SEQ ID NO: 18887 - protein, 14 aa, Severe acute respiratory syndrome coronavirus 2
  REGION 1..14: note = Table B: HLA-DQA1*01:02-B1*06:02L HLA-DRB1*01:02L HLA-DRB1*12:01L HLA-DPA1*03:01-B1*105:01L HLA-DQA1*02:01-B1*03:03L
PVMEPIYDEPTTTT

SEQ ID NO: 18888 - protein, 10 aa, Severe acute respiratory syndrome coronavirus 2
  REGION 1..10: note = Table B: HLA-DQA1*01:02-B1*06:02L HLA-DPA1*02:01-B1*13:01L HLA-DQA1*01:03-B1*06:01L HLA-DRB1*15:03L
TLIVNSVLLF

SEQ ID NO: 18889 - protein, 10 aa, Severe acute respiratory syndrome coronavirus 2
  REGION 1..10: note = Table B: HLA-DQA1*01:02-B1*06:02L HLA-DPA1*03:01-B1*105:01L HLA-DQA1*03:01-B1*03:02L HLA-DQA1*05:05-B1*03:01L HLA-DQA1*01:03-B1*06:01L HLA-DQA1*02:01-B1*03:03L
VTLAILTALR

SEQ ID NO: 18890 - protein, 10 aa, Severe acute respiratory syndrome coronavirus 2
  REGION 1..10: note = Table B: HLA-DQA1*01:02-B1*06:02L HLA-DQA1*05:05-B1*03:19L HLA-DQA1*05:01-B1*02:01L HLA-DRB1*15:03L
ILTALRLCAY

SEQ ID NO: 18891 - protein, 14 aa, Severe acute respiratory syndrome coronavirus 2
  REGION 1..14: note = Table B: HLA-DQA1*01:02-B1*06:02L HLA-DPA1*01:03-B1*03:01L HLA-DPA1*03:01-B1*04:02L HLA-DPA1*01:03-B1*04:02L HLA-DRB1*12:01L HLA-DPA1*02:01-B1*13:01L HLA-DPA1*03:01-B1*105:01L HLA-DPA1*01:03-B1*104:01L
TALRLCAYCCNIVN

SEQ ID NO: 18892 - protein, 16 aa, Severe acute respiratory syndrome coronavirus 2
  REGION 1..16: note = Table B: HLA-DQA1*01:02-B1*06:02L
LCAYCCNIVNVSLVKP

SEQ ID NO: 18893 - protein, 11 aa, Severe acute respiratory syndrome coronavirus 2
  REGION 1..11: note = Table B: HLA-DQA1*01:02-B1*06:02L HLA-DRB1*01:02L HLA-DRB1*14:01L HLA-DRB1*04:10L HLA-DQA1*05:05-B1*03:01L
NIVNVSLVKPS

SEQ ID NO: 18894 - protein, 13 aa, Severe acute respiratory syndrome coronavirus 2
  REGION 1..13: note = Table B: HLA-DQA1*01:02-B1*06:02L
LVKPSFYVYSRVK

SEQ ID NO: 18895 - protein, 14 aa, Severe acute respiratory syndrome coronavirus 2
  REGION 1..14: note = Table B: HLA-DQA1*01:02-B1*06:02L
KKLLEQWNLVIGFL

SEQ ID NO: 18896 - protein, 12 aa, Severe acute respiratory syndrome coronavirus 2
  REGION 1..12: note = Table B: HLA-DQA1*01:02-B1*06:02L
ICLLQFAYANRN

SEQ ID NO: 18897 - protein, 12 aa, Severe acute respiratory syndrome coronavirus 2
  REGION 1..12: note = Table B: HLA-DQA1*01:02-B1*06:02L
TLACFVLAAVYR

SEQ ID NO: 18898 - protein, 13 aa, Severe acute respiratory syndrome coronavirus 2
  REGION 1..13: note = Table B: HLA-DQA1*01:02-B1*06:02L HLA-DRB1*01:02L HLA-DRB1*08:04L HLA-DPA1*01:03-B1*03:01L HLA-DPA1*03:01-B1*04:02L HLA-DQA1*01-B1*05L HLA-DRB1*12:01L HLA-DPA1*02:01-B1*13:01L HLA-DPA1*03:01-B1*105:01L
  REGION 1..13: note = CONT. FROM ABOVE: HLA-DRB1*16:01L HLA-DRB1*15:03L
AAVYRINWITGGI

SEQ ID NO: 18899 - protein, 10 aa, Severe acute respiratory syndrome coronavirus 2
  REGION 1..10: note = Table B: HLA-DQA1*01:02-B1*06:02L HLA-DQA1*05:05-B1*03:19L HLA-DPA1*03:01-B1*105:01L HLA-DQA1*05:05-B1*03:01L HLA-DQA1*01:03-B1*06:01L
WITGGIAIAM

SEQ ID NO: 18900 - protein, 12 aa, Severe acute respiratory syndrome coronavirus 2
  REGION 1..12: note = Table B: HLA-DQA1*01:02-B1*06:02L HLA-DPA1*03:01-B1*105:01L
GGIAIAMACLVG

SEQ ID NO: 18901 - protein, 12 aa, Severe acute respiratory syndrome coronavirus 2
  REGION 1..12: note = Table B: HLA-DQA1*01:02-B1*06:02L HLA-DRB1*08:04L HLA-DPA1*01:03-B1*04:02L HLA-DRB1*16:01L HLA-DRB1*04:08L
YFIASFRLFART

SEQ ID NO: 18902 - protein, 13 aa, Severe acute respiratory syndrome coronavirus 2
  REGION 1..13: note = Table B: HLA-DQA1*01:02-B1*06:02L HLA-DRB1*01:02L HLA-DQA1*03:01-B1*03:02L HLA-DQA1*01:03-B1*06:01L HLA-DQA1*02:01-B1*03:03L
FARTRSMWSFNPE

SEQ ID NO: 18903 - protein, 13 aa, Severe acute respiratory syndrome coronavirus 2
  REGION 1..13: note = Table B: HLA-DQA1*01:02-B1*06:02L
SFNPETNILLNVP

SEQ ID NO: 18904 - protein, 13 aa, Severe acute respiratory syndrome coronavirus 2
  REGION 1..13: note = Table B: HLA-DQA1*01:02-B1*06:02L HLA-DQA1*03:01-B1*03:02L HLA-DQA1*01:03-B1*06:01L HLA-DQA1*02:01-B1*03:03L
NPETNILLNVPLH

SEQ ID NO: 18905 - protein, 11 aa, Severe acute respiratory syndrome coronavirus 2
  REGION 1..11: note = Table B: HLA-DQA1*01:02-B1*06:02L HLA-DPA1*01:03-B1*03:01L HLA-DPA1*03:01-B1*04:02L HLA-DQA1*05:01-B1*02:01L HLA-DPA1*01:03-B1*04:02L HLA-DPA1*02:01-B1*13:01L HLA-DPA1*03:01-B1*105:01L HLA-DPA1*01:03-B1*104:01L
  REGION 1..11: note = CONT. FROM ABOVE: HLA-DPA1*01:02-B1*04:01L HLA-DQA1*01:03-B1*06: 01L
ILLNVPLHGTI

SEQ ID NO: 18906 - protein, 12 aa, Severe acute respiratory syndrome coronavirus 2
  REGION 1..12: note = Table B: HLA-DQA1*01:02-B1*06:02L HLA-DPA1*01:03-B1*04:02L HLA-DPA1*02:01-B1*13:01L HLA-DRB1*15:03L
TILTRPLLESEL

SEQ ID NO: 18907 - protein, 12 aa, Severe acute respiratory syndrome coronavirus 2
  REGION 1..12: note = Table B: HLA-DQA1*01:02-B1*06:02L
ILTRPLLESELV

SEQ ID NO: 18908 - protein, 10 aa, Severe acute respiratory syndrome coronavirus 2
  REGION 1..10: note = Table B: HLA-DQA1*01:02-B1*06:02L HLA-DQA1*01:03-B1*06:01L
IGAVILRGHL

SEQ ID NO: 18909 - protein, 14 aa, Severe acute respiratory syndrome coronavirus 2
  REGION 1..14: note = Table B: HLA-DQA1*01:02-B1*06:02L
HHLGRCDIKDLPKE

SEQ ID NO: 18910 - protein, 14 aa, Severe acute respiratory syndrome coronavirus 2
  REGION 1..14: note = Table B: HLA-DQA1*01:02-B1*06:02L HLA-DRB1*01:02L
IKDLPKEITVATSR

SEQ ID NO: 18911 - protein, 12 aa, Severe acute respiratory syndrome coronavirus 2
  REGION 1..12: note = Table B: HLA-DQA1*01:02-B1*06:02L
RTLSYYKLGASQ

SEQ ID NO: 18912 - protein, 12 aa, Severe acute respiratory syndrome coronavirus 2
  REGION 1..12: note = Table B: HLA-DQA1*01:02-B1*06:02L
KLGASQRVAGDS

SEQ ID NO: 18913 - protein, 11 aa, Severe acute respiratory syndrome coronavirus 2
  REGION 1..11: note = Table B: HLA-DQA1*01:02-B1*06:02L
AAYSRYRIGNY

SEQ ID NO: 18914 - protein, 14 aa, Severe acute respiratory syndrome coronavirus 2
  REGION 1..14: note = Table B: HLA-DQA1*01:02-B1*06:02L HLA-DRB1*01:02L
YSRYRIGNYKLNTD

SEQ ID NO: 18915 - protein, 14 aa, Severe acute respiratory syndrome coronavirus 2
  REGION 1..14: note = Table B: HLA-DQA1*01:02-B1*06:02L
NTDHSSSSDNIALL

SEQ ID NO: 18916 - protein, 13 aa, Severe acute respiratory syndrome coronavirus 2
  REGION 1..13: note = Table B: HLA-DQA1*01:02-B1*06:02L HLA-DRB1*14:01L HLA-DPA1*02:01-B1*13:01L
HLVDFQVTIAEIL

SEQ ID NO: 18917 - protein, 12 aa, Severe acute respiratory syndrome coronavirus 2
  REGION 1..12: note = Table B: HLA-DQA1*01:02-B1*06:02L
VTIAEILLIIMR

SEQ ID NO: 18918 - protein, 10 aa, Severe acute respiratory syndrome coronavirus 2
  REGION 1..10: note = Table B: HLA-DQA1*01:02-B1*06:02L HLA-DQA1*05:01-B1*02:01L HLA-DPA1*01:03-B1*04:01L HLA-DPA1*03:01-B1*105:01L HLA-DQA1*02:01-B1*03:03L HLA-DRB1*15:03L
EILLIIMRTF

SEQ ID NO: 18919 - protein, 12 aa, Severe acute respiratory syndrome coronavirus 2
  REGION 1..12: note = Table B: HLA-DQA1*01:02-B1*06:02L HLA-DPA1*03:01-B1*04:02L HLA-DPA1*03:01-B1*105:01L
ILLIIMRTFKVS

SEQ ID NO: 18920 - protein, 13 aa, Severe acute respiratory syndrome coronavirus 2
  REGION 1..13: note = Table B: HLA-DQA1*01:02-B1*06:02L HLA-DRB1*01:02L HLA-DPA1*01:03-B1*03:01L HLA-DRB1*08:01L HLA-DPA1*02:01-B1*13:01L HLA-DPA1*01:03-B1*104:01L HLA-DQA1*01:03-B1*06:01L HLA-DRB1*15:03L
IMRTFKVSIWNLD

SEQ ID NO: 18921 - protein, 10 aa, Severe acute respiratory syndrome coronavirus 2
  REGION 1..10: note = Table B: HLA-DQA1*01:02-B1*06:02L HLA-DPA1*01:03-B1*03:01L HLA-DPA1*03:01-B1*04:02L HLA-DQA1*05:05-B1*03:19L HLA-DQA1*05:01-B1*02:01L HLA-DPA1*01:03-B1*04:01L HLA-DPA1*03:01-B1*105:01L HLA-DPA1*01:03-B1*104:01L
  REGION 1..10: note = CONT. FROM ABOVE: HLA-DRB1*16:01L
FKVSIWNLDY

SEQ ID NO: 18922 - protein, 12 aa, Severe acute respiratory syndrome coronavirus 2
  REGION 1..12: note = Table B: HLA-DQA1*01:02-B1*06:02L HLA-DQA1*05:01-B1*02:01L HLA-DPA1*03:01-B1*105:01L HLA-DRB1*15:03L
KVSIWNLDYIIN

SEQ ID NO: 18923 - protein, 13 aa, Severe acute respiratory syndrome coronavirus 2
  REGION 1..13: note = Table B: HLA-DQA1*01:02-B1*06:02L HLA-DRB1*01:02L HLA-DQA1*05:01-B1*02:01L HLA-DPA1*01:03-B1*04:02L HLA-DRB1*12:01L HLA-DPA1*01:02-B1*04:01L HLA-DRB1*16:01L
IWNLDYIINLIIK

SEQ ID NO: 18924 - protein, 10 aa, Severe acute respiratory syndrome coronavirus 2
  REGION 1..10: note = Table B: HLA-DQA1*01:02-B1*06:02L
ITLATCELYH

SEQ ID NO: 18925 - protein, 10 aa, Severe acute respiratory syndrome coronavirus 2
  REGION 1..10: note = Table B: HLA-DQA1*01:02-B1*06:02L HLA-DQA1*05:05-B1*03:19L HLA-DQA1*05:01-B1*02:01L
TLATCELYHY

SEQ ID NO: 18926 - protein, 10 aa, Severe acute respiratory syndrome coronavirus 2
  REGION 1..10: note = Table B: HLA-DQA1*01:02-B1*06:02L HLA-DPA1*03:01-B1*105:01L HLA-DQA1*01:03-B1*06:01L
LATCELYHYQ

SEQ ID NO: 18927 - protein, 11 aa, Severe acute respiratory syndrome coronavirus 2
  REGION 1..11: note = Table B: HLA-DQA1*01:02-B1*06:02L
YHYQECVRGTT

SEQ ID NO: 18928 - protein, 12 aa, Severe acute respiratory syndrome coronavirus 2
  REGION 1..12: note = Table B: HLA-DQA1*01:02-B1*06:02L HLA-DRB1*11:01L
HYQECVRGTTVL

SEQ ID NO: 18929 - protein, 15 aa, Severe acute respiratory syndrome coronavirus 2
  REGION 1..15: note = Table B: HLA-DQA1*01:02-B1*06:02L HLA-DRB1*01:02L
VRGTTVLLKEPCSSG

SEQ ID NO: 18930 - protein, 13 aa, Severe acute respiratory syndrome coronavirus 2
  REGION 1..13: note = Table B: HLA-DQA1*01:02-B1*06:02L
TVLLKEPCSSGTY

SEQ ID NO: 18931 - protein, 15 aa, Severe acute respiratory syndrome coronavirus 2
  REGION 1..15: note = Table B: HLA-DQA1*01:02-B1*06:02L HLA-DQA1*01:03-B1*06:01L
LKEPCSSGTYEGNSP

SEQ ID NO: 18932 - protein, 13 aa, Severe acute respiratory syndrome coronavirus 2
  REGION 1..13: note = Table B: HLA-DQA1*01:02-B1*06:02L HLA-DRB1*08:01L HLA-DQA1*01:03-B1*06:01L
SSGTYEGNSPFHP

SEQ ID NO: 18933 - protein, 12 aa, Severe acute respiratory syndrome coronavirus 2
  REGION 1..12: note = Table B: HLA-DQA1*01:02-B1*06:02L
GNSPFHPLADNK

SEQ ID NO: 18934 - protein, 13 aa, Severe acute respiratory syndrome coronavirus 2
  REGION 1..13: note = Table B: HLA-DQA1*01:02-B1*06:02L HLA-DPA1*03:01-B1*04:02L HLA-DPA1*01:03-B1*04:02L HLA-DRB1*15:03L
NKFALTCFSTQFA

SEQ ID NO: 18935 - protein, 13 aa, Severe acute respiratory syndrome coronavirus 2
  REGION 1..13: note = Table B: HLA-DQA1*01:02-B1*06:02L HLA-DPA1*01:02-B1*04:01L
ARSVSPKLFIRQE

SEQ ID NO: 18936 - protein, 12 aa, Severe acute respiratory syndrome coronavirus 2
  REGION 1..12: note = Table B: HLA-DQA1*01:02-B1*06:02L
SVSPKLFIRQEE

SEQ ID NO: 18937 - protein, 12 aa, Severe acute respiratory syndrome coronavirus 2
  REGION 1..12: note = Table B: HLA-DQA1*01:02-B1*06:02L HLA-DRB1*08:01L HLA-DQA1*01-B1*05L HLA-DQA1*05:01-B1*02:01L HLA-DQA1*03:01-B1*03:02L HLA-DQA1*02:01-B1*03:03L
SPKLFIRQEEVQ

SEQ ID NO: 18938 - protein, 10 aa, Severe acute respiratory syndrome coronavirus 2
  REGION 1..10: note = Table B: HLA-DQA1*01:02-B1*06:02L
IVAAIVFITL

SEQ ID NO: 18939 - protein, 13 aa, Severe acute respiratory syndrome coronavirus 2
  REGION 1..13: note = Table B: HLA-DQA1*01:02-B1*06:02L HLA-DPA1*01:02-B1*04:01L
IIFWFSLELQDHN

SEQ ID NO: 18940 - protein, 12 aa, Severe acute respiratory syndrome coronavirus 2
  REGION 1..12: note = Table B: HLA-DQA1*01:02-B1*06:02L HLA-DQA1*01:03-B1*06:01L
WFSLELQDHNET

SEQ ID NO: 18941 - protein, 14 aa, Severe acute respiratory syndrome coronavirus 2
  REGION 1..14: note = Table B: HLA-DQA1*01:02-B1*06:02L HLA-DRB1*01:02L
FSLELQDHNETCHA

SEQ ID NO: 18942 - protein, 12 aa, Severe acute respiratory syndrome coronavirus 2
  REGION 1..12: note = Table B: HLA-DQA1*01:02-B1*06:02L
TVAAFHQECSLQ

SEQ ID NO: 18943 - protein, 12 aa, Severe acute respiratory syndrome coronavirus 2
  REGION 1..12: note = Table B: HLA-DQA1*01:02-B1*06:02L
FHQECSLQSCTQ

SEQ ID NO: 18944 - protein, 12 aa, Severe acute respiratory syndrome coronavirus 2
  REGION 1..12: note = Table B: HLA-DQA1*01:02-B1*06:02L HLA-DQA1*01:03-B1*06:01L
HQECSLQSCTQH

SEQ ID NO: 18945 - protein, 10 aa, Severe acute respiratory syndrome coronavirus 2
  REGION 1..10: note = Table B: HLA-DQA1*01:02-B1*06:02L HLA-DQA1*01:03-B1*06:01L HLA-DQA1*02:01-B1*03:03L
LQSCTQHQPY

SEQ ID NO: 18946 - protein, 11 aa, Severe acute respiratory syndrome coronavirus 2
  REGION 1..11: note = Table B: HLA-DQA1*01:02-B1*06:02L HLA-DQA1*02:01-B1*03:03L
DPCPIHFYSKW

SEQ ID NO: 18947 - protein, 15 aa, Severe acute respiratory syndrome coronavirus 2
  REGION 1..15: note = Table B: HLA-DQA1*01:02-B1*06:02L HLA-DRB1*11:04L HLA-DPA1*01:03-B1*02:01L
PIHFYSKWYIRVGAR

SEQ ID NO: 18948 - protein, 14 aa, Severe acute respiratory syndrome coronavirus 2
  REGION 1..14: note = Table B: HLA-DQA1*01:02-B1*06:02L HLA-DPA1*02:01-B1*13:01L
ARKSAPLIELCVDE

SEQ ID NO: 18949 - protein, 14 aa, Severe acute respiratory syndrome coronavirus 2
  REGION 1..14: note = Table B: HLA-DQA1*01:02-B1*06:02L
KSAPLIELCVDEAG

SEQ ID NO: 18950 - protein, 13 aa, Severe acute respiratory syndrome coronavirus 2
  REGION 1..13: note = Table B: HLA-DQA1*01:02-B1*06:02L HLA-DPA1*02:01-B1*13:01L HLA-DQA1*01:03-B1*06:01L HLA-DQA1*02:01-B1*03:03L
AGSKSPIQYIDIG

SEQ ID NO: 18951 - protein, 10 aa, Severe acute respiratory syndrome coronavirus 2
  REGION 1..10: note = Table B: HLA-DQA1*01:02-B1*06:02L HLA-DPA1*01:03-B1*03:01L HLA-DRB1*14:02L HLA-DQA1*01-B1*05L HLA-DQA1*05:05-B1*03:19L HLA-DQA1*05:01-B1*02:01L HLA-DPA1*03:01-B1*105:01L HLA-DPA1*01:03-B1*104:01L HLA-DRB1*16:01L
  REGION 1..10: note = CONT. FROM ABOVE: HLA-DQA1*02:01-B1*03:03L HLA-DRB1*15:03L
PIQYIDIGNY

SEQ ID NO: 18952 - protein, 10 aa, Severe acute respiratory syndrome coronavirus 2
  REGION 1..10: note = Table B: HLA-DQA1*01:02-B1*06:02L HLA-DQA1*01:03-B1*06:01L
TVSCLPFTIN

SEQ ID NO: 18953 - protein, 12 aa, Severe acute respiratory syndrome coronavirus 2
  REGION 1..12: note = Table B: HLA-DQA1*01:02-B1*06:02L
PFTINCQEPKLG

SEQ ID NO: 18954 - protein, 12 aa, Severe acute respiratory syndrome coronavirus 2
  REGION 1..12: note = Table B: HLA-DQA1*01:02-B1*06:02L HLA-DQA1*01:03-B1*06:01L
TINCQEPKLGSL

SEQ ID NO: 18955 - protein, 14 aa, Severe acute respiratory syndrome coronavirus 2
  REGION 1..14: note = Table B: HLA-DQA1*01:02-B1*06:02L
PKLGSLVVRCSFYE

SEQ ID NO: 18956 - protein, 12 aa, Severe acute respiratory syndrome coronavirus 2
  REGION 1..12: note = Table B: HLA-DQA1*01:02-B1*06:02L HLA-DPA1*03:01-B1*04:02L HLA-DPA1*03:01-B1*105:01L
VVRCSFYEDFLE

SEQ ID NO: 18957 - protein, 11 aa, Severe acute respiratory syndrome coronavirus 2
  REGION 1..11: note = Table B: HLA-DQA1*01:02-B1*06:02L HLA-DPA1*01:03-B1*04:02L
YEDFLEYHDVR

SEQ ID NO: 18958 - protein, 10 aa, Severe acute respiratory syndrome coronavirus 2
  REGION 1..10: note = Table B: HLA-DQA1*01:02-B1*06:02L HLA-DPA1*02:01-B1*13:01L HLA-DPA1*03:01-B1*105:01L HLA-DQA1*01:03-B1*06:01L HLA-DQA1*02:01-B1*03:03L HLA-DRB1*15:03L
YHDVRVVLDF

SEQ ID NO: 18959 - protein, 13 aa, Severe acute respiratory syndrome coronavirus 2
  REGION 1..13: note = Table B: HLA-DQA1*01:02-B1*06:02L HLA-DQA1*01:01-B1*05:01L HLA-DQA1*05:01-B1*02:01L
DSTGSNQNGERSG

SEQ ID NO: 18960 - protein, 12 aa, Severe acute respiratory syndrome coronavirus 2
  REGION 1..12: note = Table B: HLA-DQA1*01:02-B1*06:02L HLA-DPA1*01:03-B1*03:01L HLA-DQA1*05:05-B1*03:19L HLA-DQA1*02:01-B1*03:03L
RPQGLPNNTASW

SEQ ID NO: 18961 - protein, 10 aa, Severe acute respiratory syndrome coronavirus 2
  REGION 1..10: note = Table B: HLA-DQA1*01:02-B1*06:02L HLA-DQA1*02:01-B1*03:03L
GLPNNTASWF

SEQ ID NO: 18962 - protein, 12 aa, Severe acute respiratory syndrome coronavirus 2
  REGION 1..12: note = Table B: HLA-DQA1*01:02-B1*06:02L
LPNNTASWFTAL

SEQ ID NO: 18963 - protein, 12 aa, Severe acute respiratory syndrome coronavirus 2
  REGION 1..12: note = Table B: HLA-DQA1*01:02-B1*06:02L
PNNTASWFTALT

SEQ ID NO: 18964 - protein, 12 aa, Severe acute respiratory syndrome coronavirus 2
  REGION 1..12: note = Table B: HLA-DQA1*01:02-B1*06:02L
NTASWFTALTQH

SEQ ID NO: 18965 - protein, 14 aa, Severe acute respiratory syndrome coronavirus 2
  REGION 1..14: note = Table B: HLA-DQA1*01:02-B1*06:02L HLA-DRB1*12:01L HLA-DQA1*01:03-B1*06:01L HLA-DRB1*15:03L
EDLKFPRGQGVPIN

SEQ ID NO: 18966 - protein, 11 aa, Severe acute respiratory syndrome coronavirus 2
  REGION 1..11: note = Table B: HLA-DQA1*01:02-B1*06:02L
DGKMKDLSPRW

SEQ ID NO: 18967 - protein, 10 aa, Severe acute respiratory syndrome coronavirus 2
  REGION 1..10: note = Table B: HLA-DQA1*01:02-B1*06:02M HLA-DPA1*01:03-B1*03:01L HLA-DRB1*03:01L HLA-DRB1*11:02L HLA-DRB1*14:02L HLA-DQA1*01-B1*05L HLA-DQA1*05:05-B1*03:19M HLA-DQA1*05:01-B1*02:01L HLA-DRB4*01:01L
  REGION 1..10: note = CONT. FROM ABOVE: HLA-DPA1*01:03-B1*04:01L HLA-DPA1*03:01-B1*105 :01L HLA-DPA1*01:03-B1*104:01L HLA-DRB1*16:01L HLA-DQA1*02:01-B1 *03:03L
DLSPRWYFYY

SEQ ID NO: 18968 - protein, 12 aa, Severe acute respiratory syndrome coronavirus 2
  REGION 1..12: note = Table B: HLA-DQA1*01:02-B1*06:02L HLA-DQA1*05:05-B1*03:19L HLA-DPA1*03:01-B1*105:01L HLA-DQA1*05:05-B1*03:01L HLA-DRB1*10:01L
YFYYLGTGPEAG

SEQ ID NO: 18969 - protein, 13 aa, Severe acute respiratory syndrome coronavirus 2
  REGION 1..13: note = Table B: HLA-DQA1*01:02-B1*06:02L HLA-DPA1*03:01-B1*105:01L HLA-DQA1*01:03-B1*06:01L
FYYLGTGPEAGLP

SEQ ID NO: 18970 - protein, 11 aa, Severe acute respiratory syndrome coronavirus 2
  REGION 1..11: note = Table B: HLA-DQA1*01:02-B1*06:02L HLA-DQA1*05:01-B1*02:01L HLA-DQA1*03:01-B1*03:02L HLA-DRB1*04:08L
GPEAGLPYGAN

SEQ ID NO: 18971 - protein, 12 aa, Severe acute respiratory syndrome coronavirus 2
  REGION 1..12: note = Table B: HLA-DQA1*01:02-B1*06:02L
PEAGLPYGANKD

SEQ ID NO: 18972 - protein, 10 aa, Severe acute respiratory syndrome coronavirus 2
  REGION 1..10: note = Table B: HLA-DQA1*01:02-B1*06:02L
YGANKDGIIW

SEQ ID NO: 18973 - protein, 12 aa, Severe acute respiratory syndrome coronavirus 2
  REGION 1..12: note = Table B: HLA-DQA1*01:02-B1*06:02L HLA-DQA1*05:05-B1*03:01L HLA-DQA1*01:03-B1*06:01L
GANKDGIIWVAT

SEQ ID NO: 18974 - protein, 12 aa, Severe acute respiratory syndrome coronavirus 2
  REGION 1..12: note = Table B: HLA-DQA1*01:02-B1*06:02L HLA-DPA1*03:01-B1*105:01L HLA-DQA1*05:05-B1*03:01L HLA-DQA1*02:01-B1*03:03L
ANKDGIIWVATE

SEQ ID NO: 18975 - protein, 14 aa, Severe acute respiratory syndrome coronavirus 2
  REGION 1..14: note = Table B: HLA-DQA1*01:02-B1*06:02L HLA-DPA1*01:03-B1*03:01L HLA-DPA1*02:01-B1*13:01L HLA-DQA1*05:05-B1*03:01L HLA-DQA1*01:03-B1*06:01L
GTRNPANNAAIVLQ

SEQ ID NO: 18976 - protein, 13 aa, Severe acute respiratory syndrome coronavirus 2
  REGION 1..13: note = Table B: HLA-DQA1*01:02-B1*06:02L HLA-DQA1*01:03-B1*06:01L
NPANNAAIVLQLP

SEQ ID NO: 18977 - protein, 12 aa, Severe acute respiratory syndrome coronavirus 2
  REGION 1..12: note = Table B: HLA-DQA1*01:02-B1*06:02L
ANNAAIVLQLPQ

SEQ ID NO: 18978 - protein, 10 aa, Severe acute respiratory syndrome coronavirus 2
  REGION 1..10: note = Table B: HLA-DQA1*01:02-B1*06:02L HLA-DPA1*02:01-B1*13:01L HLA-DQA1*01:03-B1*06:01L HLA-DQA1*02:01-B1*03:03L
PQGTTLPKGF

SEQ ID NO: 18979 - protein, 10 aa, Severe acute respiratory syndrome coronavirus 2
  REGION 1..10: note = Table B: HLA-DQA1*01:02-B1*06:02L HLA-DQA1*05:05-B1*03:19L
QGTTLPKGFY

SEQ ID NO: 18980 - protein, 14 aa, Severe acute respiratory syndrome coronavirus 2
  REGION 1..14: note = Table B: HLA-DQA1*01:02-B1*06:02L
RNSSRNSTPGSSRG

SEQ ID NO: 18981 - protein, 16 aa, Severe acute respiratory syndrome coronavirus 2
  REGION 1..16: note = Table B: HLA-DQA1*01:02-B1*06:02L HLA-DQA1*01:03-B1*06:01L
NSSRNSTPGSSRGTSP

SEQ ID NO: 18982 - protein, 13 aa, Severe acute respiratory syndrome coronavirus 2
  REGION 1..13: note = Table B: HLA-DQA1*01:02-B1*06:02L HLA-DRB1*14:54L HLA-DQA1*01:03-B1*06:01L HLA-DRB1*04:08L
NSTPGSSRGTSPA

SEQ ID NO: 18983 - protein, 14 aa, Severe acute respiratory syndrome coronavirus 2
  REGION 1..14: note = Table B: HLA-DQA1*01:02-B1*06:02L HLA-DQA1*05:05-B1*03:19L HLA-DQA1*01:03-B1*06:01L
TPGSSRGTSPARMA

SEQ ID NO: 18984 - protein, 13 aa, Severe acute respiratory syndrome coronavirus 2
  REGION 1..13: note = Table B: HLA-DQA1*01:02-B1*06:02L HLA-DQA1*01:03-B1*06:01L
SRGTSPARMAGNG

SEQ ID NO: 18985 - protein, 14 aa, Severe acute respiratory syndrome coronavirus 2
  REGION 1..14: note = Table B: HLA-DQA1*01:02-B1*06:02L
RMAGNGGDAALALL

SEQ ID NO: 18986 - protein, 12 aa, Severe acute respiratory syndrome coronavirus 2
  REGION 1..12: note = Table B: HLA-DQA1*01:02-B1*06:02L HLA-DQA1*05:01-B1*02:01L HLA-DQA1*01:03-B1*06:01L HLA-DRB1*15:03L
AALALLLLDRLN

SEQ ID NO: 18987 - protein, 14 aa, Severe acute respiratory syndrome coronavirus 2
  REGION 1..14: note = Table B: HLA-DQA1*01:02-B1*06:02L
ESKMSGKGQQQQGQ

SEQ ID NO: 18988 - protein, 15 aa, Severe acute respiratory syndrome coronavirus 2
  REGION 1..15: note = Table B: HLA-DQA1*01:02-B1*06:02L
GKGQQQQGQTVTKKS

SEQ ID NO: 18989 - protein, 14 aa, Severe acute respiratory syndrome coronavirus 2
  REGION 1..14: note = Table B: HLA-DQA1*01:02-B1*06:02L HLA-DQA1*01:03-B1*06:01L
GQQQQGQTVTKKSA

SEQ ID NO: 18990 - protein, 13 aa, Severe acute respiratory syndrome coronavirus 2
  REGION 1..13: note = Table B: HLA-DQA1*01:02-B1*06:02L
QQGQTVTKKSAAE

SEQ ID NO: 18991 - protein, 14 aa, Severe acute respiratory syndrome coronavirus 2
  REGION 1..14: note = Table B: HLA-DQA1*01:02-B1*06:02L
QGQTVTKKSAAEAS

SEQ ID NO: 18992 - protein, 14 aa, Severe acute respiratory syndrome coronavirus 2
  REGION 1..14: note = Table B: HLA-DQA1*01:02-B1*06:02L HLA-DRB1*04:08L
TKKSAAEASKKPRQ

SEQ ID NO: 18993 - protein, 11 aa, Severe acute respiratory syndrome coronavirus 2
  REGION 1..11: note = Table B: HLA-DQA1*01:02-B1*06:02L HLA-DQA1*02:01-B1*03:03L
DQELIRQGTDY

SEQ ID NO: 18994 - protein, 13 aa, Severe acute respiratory syndrome coronavirus 2
  REGION 1..13: note = Table B: HLA-DQA1*01:02-B1*06:02L HLA-DQA1*05:05-B1*03:01L HLA-DQA1*01:03-B1*06:01L
HWPQIAQFAPSAS

SEQ ID NO: 18995 - protein, 12 aa, Severe acute respiratory syndrome coronavirus 2
  REGION 1..12: note = Table B: HLA-DQA1*01:02-B1*06:02L HLA-DQA1*05:05-B1*03:01L HLA-DQA1*01:03-B1*06:01L
FAPSASAFFGMS

SEQ ID NO: 18996 - protein, 12 aa, Severe acute respiratory syndrome coronavirus 2
  REGION 1..12: note = Table B: HLA-DQA1*01:02-B1*06:02L HLA-DPA1*03:01-B1*105:01L
SASAFFGMSRIG

SEQ ID NO: 18997 - protein, 10 aa, Severe acute respiratory syndrome coronavirus 2
  REGION 1..10: note = Table B: HLA-DQA1*01:02-B1*06:02L HLA-DQA1*01:03-B1*06:01L
AFFGMSRIGM

SEQ ID NO: 18998 - protein, 14 aa, Severe acute respiratory syndrome coronavirus 2
  REGION 1..14: note = Table B: HLA-DQA1*01:02-B1*06:02L
FFGMSRIGMEVTPS

SEQ ID NO: 18999 - protein, 10 aa, Severe acute respiratory syndrome coronavirus 2
  REGION 1..10: note = Table B: HLA-DQA1*01:02-B1*06:02L HLA-DQA1*05:05-B1*03:19L HLA-DQA1*05:01-B1*02:01L
GMEVTPSGTW

SEQ ID NO: 19000 - protein, 13 aa, Severe acute respiratory syndrome coronavirus 2
  REGION 1..13: note = Table B: HLA-DQA1*01:02-B1*06:02L
PSGTWLTYTGAIK

SEQ ID NO: 19001 - protein, 13 aa, Severe acute respiratory syndrome coronavirus 2
  REGION 1..13: note = Table B: HLA-DQA1*01:02-B1*06:02L HLA-DRB1*14:01L HLA-DRB1*14:02L HLA-DQA1*05:05-B1*03:19L HLA-DRB1*15:01L
GTWLTYTGAIKLD

SEQ ID NO: 19002 - protein, 12 aa, Severe acute respiratory syndrome coronavirus 2
  REGION 1..12: note = Table B: HLA-DQA1*01:02-B1*06:02L HLA-DQA1*05:05-B1*03:19L HLA-DQA1*05:05-B1*03:01L
WLTYTGAIKLDD

SEQ ID NO: 19003 - protein, 12 aa, Severe acute respiratory syndrome coronavirus 2
  REGION 1..12: note = Table B: HLA-DQA1*01:02-B1*06:02L
YTGAIKLDDKDP

SEQ ID NO: 19004 - protein, 13 aa, Severe acute respiratory syndrome coronavirus 2
  REGION 1..13: note = Table B: HLA-DQA1*01:02-B1*06:02L HLA-DQA1*01-B1*05L HLA-DPA1*02:01-B1*13:01L HLA-DPA1*03:01-B1*105:01L
IKLDDKDPNFKDQ

SEQ ID NO: 19005 - protein, 15 aa, Severe acute respiratory syndrome coronavirus 2
  REGION 1..15: note = Table B: HLA-DQA1*01:02-B1*06:02L HLA-DPA1*03:01-B1*105:01L HLA-DRB1*15:03L
DDKDPNFKDQVILLN

SEQ ID NO: 19006 - protein, 12 aa, Severe acute respiratory syndrome coronavirus 2
  REGION 1..12: note = Table B: HLA-DQA1*01:02-B1*06:02L
KADETQALPQRQ

SEQ ID NO: 19007 - protein, 12 aa, Severe acute respiratory syndrome coronavirus 2
  REGION 1..12: note = Table B: HLA-DQA1*01:02-B1*06:02L
TQALPQRQKKQQ

SEQ ID NO: 19008 - protein, 10 aa, Severe acute respiratory syndrome coronavirus 2
  REGION 1..10: note = Table B: HLA-DQA1*01:02-B1*06:02L HLA-DQA1*03:01-B1*03:02L HLA-DQA1*01:03-B1*06:01L HLA-DQA1*02:01-B1*03:03L
QTVTLLPAAD

SEQ ID NO: 19009 - protein, 10 aa, Severe acute respiratory syndrome coronavirus 2
  REGION 1..10: note = Table B: HLA-DQA1*01:02-B1*06:02L HLA-DQA1*05:01-B1*02:01L
LLPAADLDDF

SEQ ID NO: 19010 - protein, 14 aa, Severe acute respiratory syndrome coronavirus 2
  REGION 1..14: note = Table B: HLA-DQA1*01:02-B1*06:02L HLA-DRB1*01:02L HLA-DPA1*02:01-B1*13:01L HLA-DRB1*15:03L
LPAADLDDFSKQLQ

SEQ ID NO: 19011 - protein, 12 aa, Severe acute respiratory syndrome coronavirus 2
  REGION 1..12: note = Table B: HLA-DQA1*01:02-B1*06:02L HLA-DPA1*03:01-B1*105:01L
LDDFSKQLQQSM

SEQ ID NO: 19012 - protein, 12 aa, Severe acute respiratory syndrome coronavirus 2
  REGION 1..12: note = Table B: HLA-DQA1*01:02-B1*06:02L HLA-DQA1*05:05-B1*03:19L HLA-DPA1*03:01-B1*105:01L HLA-DQA1*05:05-B1*03:01L
DDFSKQLQQSMS

SEQ ID NO: 19013 - protein, 14 aa, Severe acute respiratory syndrome coronavirus 2
  REGION 1..14: note = Table B: HLA-DQA1*01:02-B1*06:02L HLA-DPA1*01:03-B1*03:01L HLA-DPA1*02:01-B1*13:01L HLA-DQA1*05:05-B1*03:01L HLA-DQA1*02:01-B1*03:03L
DFSKQLQQSMSSAD

SEQ ID NO: 19014 - protein, 14 aa, Severe acute respiratory syndrome coronavirus 2
  REGION 1..14: note = Table B: HLA-DQA1*01:02-B1*06:02L HLA-DQA1*05:05-B1*03:01L
FSKQLQQSMSSADS

SEQ ID NO: 19015 - protein, 16 aa, Severe acute respiratory syndrome coronavirus 2
  REGION 1..16: note = Table B: HLA-DQA1*01:02-B1*06:02L HLA-DRB1*16:01L HLA-DRB1*04:08L
FPFTIYSLLLCRMNSR

SEQ ID NO: 19016 - protein, 12 aa, Severe acute respiratory syndrome coronavirus 2
  REGION 1..12: note = Table B: HLA-DQA1*01:02-B1*06:02L
YSLLLCRMNSRN

SEQ ID NO: 19017 - protein, 12 aa, Severe acute respiratory syndrome coronavirus 2
  REGION 1..12: note = Table B: HLA-DQA1*01:02-B1*06:02L
SLLLCRMNSRNY

SEQ ID NO: 19018 - protein, 14 aa, Severe acute respiratory syndrome coronavirus 2
  REGION 1..14: note = Table B: HLA-DRB1*01:01L HLA-DRB1*08:01L HLA-DRB3*01:01L HLA-DRB1*08:03L
TRELMRELNGGAYT

SEQ ID NO: 19019 - protein, 15 aa, Severe acute respiratory syndrome coronavirus 2
  REGION 1..15: note = Table B: HLA-DRB1*01:01L HLA-DQA1*01-B1*05L HLA-DPA1*02:01-B1*13:01L HLA-DQA1*05:05-B1*03:01L HLA-DRB1*10:01L HLA-DQA1*01:03-B1*06:01L
GYPLECIKDLLARAG

SEQ ID NO: 19020 - protein, 15 aa, Severe acute respiratory syndrome coronavirus 2
  REGION 1..15: note = Table B: HLA-DRB1*01:01L
IRSVYPVASPNECNQ

SEQ ID NO: 19021 - protein, 18 aa, Severe acute respiratory syndrome coronavirus 2
  REGION 1..18: note = Table B: HLA-DRB1*01:01L HLA-DRB1*04:08L
GTENLTKEGATTCGYLPQ

SEQ ID NO: 19022 - protein, 13 aa, Severe acute respiratory syndrome coronavirus 2
  REGION 1..13: note = Table B: HLA-DRB1*01:01L HLA-DRB1*14:02L HLA-DQA1*05:05-B1*03:01L
AEYHNESGLKTIL

SEQ ID NO: 19023 - protein, 14 aa, Severe acute respiratory syndrome coronavirus 2
  REGION 1..14: note = Table B: HLA-DRB1*01:01L HLA-DRB3*02:01L HLA-DRB1*11:04L HLA-DRB5*01:01L HLA-DRB1*09:01L HLA-DPA1*01:03-B1*04:02L HLA-DPA1*02:01-B1*13:01L HLA-DPA1*01:03-B1*104:01L
TGVVGEGSEGLNDN

SEQ ID NO: 19024 - protein, 16 aa, Severe acute respiratory syndrome coronavirus 2
  REGION 1..16: note = Table B: HLA-DRB1*01:01L
NDNLLEILQKEKVNIN

SEQ ID NO: 19025 - protein, 13 aa, Severe acute respiratory syndrome coronavirus 2
  REGION 1..13: note = Table B: HLA-DRB1*01:01L HLA-DRB1*08:04L HLA-DPA1*01:03-B1*03:01L HLA-DPA1*03:01-B1*04:02L HLA-DRB1*14:01L HLA-DRB1*11:04L HLA-DRB5*01:01L HLA-DQA1*01-B1*05L HLA-DRB1*04:10L HLA-DRB1*14:54L
  REGION 1..13: note = CONT. FROM ABOVE: HLA-DRB1*10:01L HLA-DRB1*04:08L HLA-DRB1*08:03 L
LASFSASTSAFVE

SEQ ID NO: 19026 - protein, 13 aa, Severe acute respiratory syndrome coronavirus 2
  REGION 1..13: note = Table B: HLA-DRB1*01:01L HLA-DRB1*14:01L HLA-DRB1*14:54L HLA-DRB1*10:01L HLA-DRB1*04:08L
ASFSASTSAFVET

SEQ ID NO: 19027 - protein, 13 aa, Severe acute respiratory syndrome coronavirus 2
  REGION 1..13: note = Table B: HLA-DRB1*01:01L HLA-DRB1*12:02L HLA-DPA1*01:03-B1*02:01L HLA-DRB1*07:01L
SAFVETVKGLDYK

SEQ ID NO: 19028 - protein, 16 aa, Severe acute respiratory syndrome coronavirus 2
  REGION 1..16: note = Table B: HLA-DRB1*01:01L HLA-DRB1*03:01L HLA-DRB1*11:02L HLA-DPA1*01:03-B1*04:02L HLA-DPA1*01:03-B1*02:01L
NSVRVLQKAAITILDG

SEQ ID NO: 19029 - protein, 14 aa, Severe acute respiratory syndrome coronavirus 2
  REGION 1..14: note = Table B: HLA-DRB1*01:01L HLA-DRB1*10:01L
LTNIFGTVYEKLKP

SEQ ID NO: 19030 - protein, 16 aa, Severe acute respiratory syndrome coronavirus 2
  REGION 1..16: note = Table B: HLA-DRB1*01:01L HLA-DRB3*02:01L HLA-DRB1*11:02L HLA-DRB1*14:02L HLA-DPA1*01:03-B1*02:01L HLA-DRB1*08:03L
EEKFKEGVEFLRDGWE

SEQ ID NO: 19031 - protein, 17 aa, Severe acute respiratory syndrome coronavirus 2
  REGION 1..17: note = Table B: HLA-DRB1*01:01L HLA-DRB1*11:02L HLA-DRB1*11:01L HLA-DPA1*01:03-B1*02:01L HLA-DRB1*08:02L
APTKVTFGDDTVIEVQG

SEQ ID NO: 19032 - protein, 12 aa, Severe acute respiratory syndrome coronavirus 2
  REGION 1..12: note = Table B: HLA-DRB1*01:01L HLA-DRB1*11:01L HLA-DRB4*02:01NL HLA-DRB4*01:01L HLA-DPA1*01:03-B1*04:01L HLA-DPA1*01:03-B1*04:02L HLA-DPA1*01:03-B1*104:01L
DAVIKTLQPVSE

SEQ ID NO: 19033 - protein, 14 aa, Severe acute respiratory syndrome coronavirus 2
  REGION 1..14: note = Table B: HLA-DRB1*01:01L
YEYGTEDDYQGKPL

SEQ ID NO: 19034 - protein, 14 aa, Severe acute respiratory syndrome coronavirus 2
  REGION 1..14: note = Table B: HLA-DRB1*01:01L HLA-DRB1*03:01L
VYIKNADIVEEAKK

SEQ ID NO: 19035 - protein, 15 aa, Severe acute respiratory syndrome coronavirus 2
  REGION 1..15: note = Table B: HLA-DRB1*01:01L HLA-DPA1*01:03-B1*02:01L HLA-DRB1*07:01L
EQKIAEIPKEEVKPF

SEQ ID NO: 19036 - protein, 14 aa, Severe acute respiratory syndrome coronavirus 2
  REGION 1..14: note = Table B: HLA-DRB1*01:01L HLA-DQA1*05:05-B1*03:19L HLA-DRB4*02:01NL HLA-DRB4*01:01L HLA-DPA1*01:03-B1*04:01L HLA-DPA1*01:03-B1*04:02L HLA-DQA1*05:05-B1*03:01L
INGNLHPDSATLVS

SEQ ID NO: 19037 - protein, 14 aa, Severe acute respiratory syndrome coronavirus 2
  REGION 1..14: note = Table B: HLA-DRB1*01:01L HLA-DRB3*02:01L HLA-DRB1*11:02L HLA-DRB1*11:03L HLA-DQA1*01:01-B1*05:01L HLA-DRB1*08:01L HLA-DRB1*11:01L HLA-DRB5*01:01L HLA-DRB1*13:01L HLA-DQA1*05:05-B1*03:116L HLA-DRB1*09:01L HLA-DRB3*01:01L
  REGION 1..14: note = CONT. FROM ABOVE: HLA-DPA1*01:03-B1*02:01L HLA-DRB1*07:01L HLA-D RB1*08:02L HLA-DRB1*08:03L
APYIVGDVVQEGVL

SEQ ID NO: 19038 - protein, 12 aa, Severe acute respiratory syndrome coronavirus 2
  REGION 1..12: note = Table B: HLA-DRB1*01:01L HLA-DPA1*01:03-B1*03:01L HLA-DRB1*11:04L HLA-DPA1*01:03-B1*04:01L HLA-DPA1*01:03-B1*04:02L HLA-DPA1*02:01-B1*13:01L HLA-DRB1*10:01L HLA-DRB1*08:03L
NYITTYPGQGLN

SEQ ID NO: 19039 - protein, 16 aa, Severe acute respiratory syndrome coronavirus 2
  REGION 1..16: note = Table B: HLA-DRB1*01:01L HLA-DRB3*01:01L HLA-DRB1*07:01L
SPDAVTAYNGYLTSSS

SEQ ID NO: 19040 - protein, 15 aa, Severe acute respiratory syndrome coronavirus 2
  REGION 1..15: note = Table B: HLA-DRB1*01:01L HLA-DRB1*08:04L HLA-DPA1*01:03-B1*03:01L HLA-DPA1*03:01-B1*04:02L HLA-DRB1*14:02L HLA-DRB1*11:01L HLA-DPA1*01:03-B1*04:02L HLA-DPA1*02:01-B1*13:01L
VTAYNGYLTSSSKTP

SEQ ID NO: 19041 - protein, 15 aa, Severe acute respiratory syndrome coronavirus 2
  REGION 1..15: note = Table B: HLA-DRB1*01:01L
LLSLREVRTIKVFTT

SEQ ID NO: 19042 - protein, 15 aa, Severe acute respiratory syndrome coronavirus 2
  REGION 1..15: note = Table B: HLA-DRB1*01:01L
DGADVTKIKPHNSHE

SEQ ID NO: 19043 - protein, 13 aa, Severe acute respiratory syndrome coronavirus 2
  REGION 1..13: note = Table B: HLA-DRB1*01:01L HLA-DRB1*08:04L HLA-DRB1*11:04L HLA-DRB1*11:01L HLA-DRB3*01:01L HLA-DRB1*07:01L HLA-DRB1*08:03L
KTFYVLPNDDTLR

SEQ ID NO: 19044 - protein, 15 aa, Severe acute respiratory syndrome coronavirus 2
  REGION 1..15: note = Table B: HLA-DRB1*01:01L HLA-DRB1*11:03L HLA-DRB1*08:03L
DDTLRVEAFEYYHTT

SEQ ID NO: 19045 - protein, 16 aa, Severe acute respiratory syndrome coronavirus 2
  REGION 1..16: note = Table B: HLA-DRB1*01:01L HLA-DRB1*07:01L
DPSFLGRYMSALNHTK

SEQ ID NO: 19046 - protein, 18 aa, Severe acute respiratory syndrome coronavirus 2
  REGION 1..18: note = Table B: HLA-DRB1*01:01L HLA-DRB1*11:02L
ATALLTLQQIELKFNPPA

SEQ ID NO: 19047 - protein, 15 aa, Severe acute respiratory syndrome coronavirus 2
  REGION 1..15: note = Table B: HLA-DRB1*01:01L HLA-DRB1*03:01L HLA-DRB4*01:01L HLA-DPA1*01:03-B1*02:01L HLA-DRB1*07:01L
LQQIELKFNPPALQD

SEQ ID NO: 19048 - protein, 14 aa, Severe acute respiratory syndrome coronavirus 2
  REGION 1..14: note = Table B: HLA-DRB1*01:01L HLA-DQA1*05:05-B1*03:01L HLA-DRB1*04:08L
YRARAGEAANFCAL

SEQ ID NO: 19049 - protein, 13 aa, Severe acute respiratory syndrome coronavirus 2
  REGION 1..13: note = Table B: HLA-DRB1*01:01L HLA-DRB1*11:03L HLA-DRB1*14:02L HLA-DPA1*01:03-B1*104:01L HLA-DQA1*05:05-B1*03:01L HLA-DRB1*10:01L
GTLSYEQFKKGVQ

SEQ ID NO: 19050 - protein, 12 aa, Severe acute respiratory syndrome coronavirus 2
  REGION 1..12: note = Table B: HLA-DRB1*01:01L
PFVMMSAPPAQY

SEQ ID NO: 19051 - protein, 12 aa, Severe acute respiratory syndrome coronavirus 2
  REGION 1..12: note = Table B: HLA-DRB1*01:01L HLA-DRB1*08:04L HLA-DRB3*02:01L HLA-DRB1*11:03L HLA-DRB1*11:04L
FVMMSAPPAQYE

SEQ ID NO: 19052 - protein, 15 aa, Severe acute respiratory syndrome coronavirus 2
  REGION 1..15: note = Table B: HLA-DRB1*01:01L HLA-DRB1*13:01L
TGNYQCGHYKHITSK

SEQ ID NO: 19053 - protein, 15 aa, Severe acute respiratory syndrome coronavirus 2
  REGION 1..15: note = Table B: HLA-DRB1*01:01L
TDVFYKENSYTTTIK

SEQ ID NO: 19054 - protein, 14 aa, Severe acute respiratory syndrome coronavirus 2
  REGION 1..14: note = Table B: HLA-DRB1*01:01L HLA-DRB1*07:01L
DLNQLTGYKKPASR

SEQ ID NO: 19055 - protein, 14 aa, Severe acute respiratory syndrome coronavirus 2
  REGION 1..14: note = Table B: HLA-DRB1*01:01L HLA-DRB1*03:01L HLA-DRB1*14:02L HLA-DQA1*05:05-B1*03:19L HLA-DRB1*13:01L HLA-DQA1*05:05-B1*03:116L HLA-DPA1*01:03-B1*04:02L HLA-DPA1*03:01-B1*105:01L HLA-DPA1*01:03-B1*02:01L
  REGION 1..14: note = CONT. FROM ABOVE: HLA-DQA1*05:05-B1*03:01L HLA-DRB1*07:01L HLA-D RB1*08:02L
LNQLTGYKKPASRE

SEQ ID NO: 19056 - protein, 15 aa, Severe acute respiratory syndrome coronavirus 2
  REGION 1..15: note = Table B: HLA-DRB1*01:01L HLA-DRB1*03:01L HLA-DRB1*07:01L
NQLTGYKKPASRELK

SEQ ID NO: 19057 - protein, 14 aa, Severe acute respiratory syndrome coronavirus 2
  REGION 1..14: note = Table B: HLA-DRB1*01:01L HLA-DRB1*11:02L HLA-DRB1*13:01L HLA-DPA1*01:03-B1*02:01L HLA-DRB1*07:01L HLA-DRB1*08:02L
KVTFFPDLNGDVVA

SEQ ID NO: 19058 - protein, 13 aa, Severe acute respiratory syndrome coronavirus 2
  REGION 1..13: note = Table B: HLA-DRB1*01:01L HLA-DRB4*02:01NL HLA-DRB1*09:01L HLA-DPA1*01:03-B1*104:01L HLA-DRB1*07:01L HLA-DRB1*08:02L HLA-DRB1*15:01L
DVVAIDYKHYTPS

SEQ ID NO: 19059 - protein, 14 aa, Severe acute respiratory syndrome coronavirus 2
  REGION 1..14: note = Table B: HLA-DRB1*01:01L HLA-DPA1*01:03-B1*104:01L HLA-DRB1*07:01L HLA-DRB1*08:02L
VVAIDYKHYTPSFK

SEQ ID NO: 19060 - protein, 14 aa, Severe acute respiratory syndrome coronavirus 2
  REGION 1..14: note = Table B: HLA-DRB1*01:01L
HKPIVWHVNNATNK

SEQ ID NO: 19061 - protein, 14 aa, Severe acute respiratory syndrome coronavirus 2
  REGION 1..14: note = Table B: HLA-DRB1*01:01L HLA-DRB1*08:04L HLA-DPA1*01:03-B1*03:01L HLA-DRB1*11:03L HLA-DRB1*14:02L HLA-DPA1*03:01-B1*105:01L
KPIVWHVNNATNKA

SEQ ID NO: 19062 - protein, 18 aa, Severe acute respiratory syndrome coronavirus 2
  REGION 1..18: note = Table B: HLA-DRB1*01:01L HLA-DRB1*07:01L
PIVWHVNNATNKATYKPN

SEQ ID NO: 19063 - protein, 12 aa, Severe acute respiratory syndrome coronavirus 2
  REGION 1..12: note = Table B: HLA-DRB1*01:01L HLA-DRB1*11:03L HLA-DRB1*11:04L HLA-DRB1*08:01L HLA-DRB1*11:01L HLA-DRB3*01:01L HLA-DRB1*07:01L HLA-DRB1*10:01L
SFNYLKSPNFSK

SEQ ID NO: 19064 - protein, 15 aa, Severe acute respiratory syndrome coronavirus 2
  REGION 1..15: note = Table B: HLA-DRB1*01:01L HLA-DRB1*11:03L HLA-DRB1*09:01L
ISSFKWDLTAFGLVA

SEQ ID NO: 19065 - protein, 11 aa, Severe acute respiratory syndrome coronavirus 2
  REGION 1..11: note = Table B: HLA-DRB1*01:01L HLA-DRB1*03:01L
FISDEVARDLS

SEQ ID NO: 19066 - protein, 13 aa, Severe acute respiratory syndrome coronavirus 2
  REGION 1..13: note = Table B: HLA-DRB1*01:01L HLA-DRB4*01:01L
QSSYIVDSVTVKN

SEQ ID NO: 19067 - protein, 14 aa, Severe acute respiratory syndrome coronavirus 2
  REGION 1..14: note = Table B: HLA-DRB1*01:01L HLA-DRB1*07:01L HLA-DRB1*08:03L
NGSIHLYFDKAGQK

SEQ ID NO: 19068 - protein, 12 aa, Severe acute respiratory syndrome coronavirus 2
  REGION 1..12: note = Table B: HLA-DRB1*01:01L HLA-DRB3*01:01L
HFVNLDNLRANN

SEQ ID NO: 19069 - protein, 15 aa, Severe acute respiratory syndrome coronavirus 2
  REGION 1..15: note = Table B: HLA-DRB1*01:01L HLA-DRB1*11:02L HLA-DQA1*01:01-B1*05:01L HLA-DRB1*08:01L HLA-DRB1*11:01L HLA-DRB5*01:01L HLA-DRB1*13:01L HLA-DPA1*01:03-B1*04:01L HLA-DRB1*09:01L HLA-DPA1*02:01-B1*13:01L
  REGION 1..15: note = CONT. FROM ABOVE: HLA-DPA1*01:03-B1*02:01L HLA-DPA1*01:03-B1*104 :01L HLA-DPA1*01:02-B1*04:01L HLA-DRB1*07:01L HLA-DRB1*08:02L HL A-DRB1*08:03L
QPILLLDQALVSDVG

SEQ ID NO: 19070 - protein, 12 aa, Severe acute respiratory syndrome coronavirus 2
  REGION 1..12: note = Table B: HLA-DRB1*01:01L HLA-DRB1*11:03L HLA-DPA1*01:03-B1*04:01L HLA-DRB1*09:01L HLA-DPA1*02:01-B1*13:01L HLA-DRB1*10:01L
TFSSTFNVPMEK

SEQ ID NO: 19071 - protein, 16 aa, Severe acute respiratory syndrome coronavirus 2
  REGION 1..16: note = Table B: HLA-DRB1*01:01L HLA-DRB3*02:01L HLA-DPA1*03:01-B1*04:02L HLA-DRB1*03:01L HLA-DRB1*11:01L HLA-DQA1*05:05-B1*03:19L HLA-DRB4*01:01L HLA-DRB3*01:01L HLA-DPA1*01:02-B1*04:01L
VPMEKLKTLVATAEAE

SEQ ID NO: 19072 - protein, 15 aa, Severe acute respiratory syndrome coronavirus 2
  REGION 1..15: note = Table B: HLA-DRB1*01:01L HLA-DRB5*01:01L
EAELAKNVSLDNVLS

SEQ ID NO: 19073 - protein, 16 aa, Severe acute respiratory syndrome coronavirus 2
  REGION 1..16: note = Table B: HLA-DRB1*01:01L HLA-DRB1*03:01L HLA-DRB1*13:01L HLA-DRB1*07:01L HLA-DRB1*08:02L
RKQIRSAAKKNNLPFK

SEQ ID NO: 19074 - protein, 15 aa, Severe acute respiratory syndrome coronavirus 2
  REGION 1..15: note = Table B: HLA-DRB1*01:01L HLA-DRB1*11:01L
DTWFSQRGGSYTNDK

SEQ ID NO: 19075 - protein, 14 aa, Severe acute respiratory syndrome coronavirus 2
  REGION 1..14: note = Table B: HLA-DRB1*01:01L HLA-DRB1*04:08L
LPRVFSAVGNICYT

SEQ ID NO: 19076 - protein, 15 aa, Severe acute respiratory syndrome coronavirus 2
  REGION 1..15: note = Table B: HLA-DRB1*01:01L
VGNICYTPSKLIEYT

SEQ ID NO: 19077 - protein, 12 aa, Severe acute respiratory syndrome coronavirus 2
  REGION 1..12: note = Table B: HLA-DRB1*01:01L HLA-DRB1*08:04L HLA-DPA1*03:01-B1*04:02L HLA-DRB1*11:03L HLA-DRB1*11:04L HLA-DRB1*14:02L HLA-DRB1*08:01L HLA-DRB1*04:10L HLA-DRB1*09:01L HLA-DRB1*12:02L HLA-DRB3*01:01L HLA-DRB1*10:01L
TIFKDASGKPVP

SEQ ID NO: 19078 - protein, 16 aa, Severe acute respiratory syndrome coronavirus 2
  REGION 1..16: note = Table B: HLA-DRB1*01:01L HLA-DRB1*11:03L HLA-DRB4*01:01L HLA-DRB1*09:01L HLA-DRB1*12:02L HLA-DRB3*01:01L HLA-DRB1*07:01L HLA-DRB1*08:02L HLA-DRB1*08:03L
DTNVLEGSVAYESLRP

SEQ ID NO: 19079 - protein, 13 aa, Severe acute respiratory syndrome coronavirus 2
  REGION 1..13: note = Table B: HLA-DRB1*01:01L HLA-DRB1*11:02L HLA-DRB1*11:01L HLA-DRB1*12:02L HLA-DRB3*01:01L HLA-DPA1*01:03-B1*02:01L HLA-DPA1*01:03-B1*104:01L
YVLMDGSIIQFPN

SEQ ID NO: 19080 - protein, 13 aa, Severe acute respiratory syndrome coronavirus 2
  REGION 1..13: note = Table B: HLA-DRB1*01:01L HLA-DRB1*11:02L HLA-DRB1*11:01L HLA-DRB3*01:01L HLA-DRB1*10:01L
DGSIIQFPNTYLE

SEQ ID NO: 19081 - protein, 14 aa, Severe acute respiratory syndrome coronavirus 2
  REGION 1..14: note = Table B: HLA-DRB1*01:01L HLA-DRB3*02:01L HLA-DPA1*02:01-B1*13:01L HLA-DPA1*01:03-B1*104:01L
PLIQPIGALDISAS

SEQ ID NO: 19082 - protein, 14 aa, Severe acute respiratory syndrome coronavirus 2
  REGION 1..14: note = Table B: HLA-DRB1*01:01L HLA-DRB3*01:01L HLA-DRB1*07:01L
TQYNRYLALYNKYK

SEQ ID NO: 19083 - protein, 14 aa, Severe acute respiratory syndrome coronavirus 2
  REGION 1..14: note = Table B: HLA-DRB1*01:01L HLA-DRB1*07:01L HLA-DRB1*15:01L
YNRYLALYNKYKYF

SEQ ID NO: 19084 - protein, 14 aa, Severe acute respiratory syndrome coronavirus 2
  REGION 1..14: note = Table B: HLA-DRB1*01:01L HLA-DRB1*14:02L
NKYKYFSGAMDTTS

SEQ ID NO: 19085 - protein, 14 aa, Severe acute respiratory syndrome coronavirus 2
  REGION 1..14: note = Table B: HLA-DRB1*01:01L HLA-DRB1*11:03L HLA-DRB1*11:01L HLA-DRB1*09:01L HLA-DRB3*01:01L HLA-DPA1*01:03-B1*02:01L HLA-DRB1*07:01L HLA-DRB1*08:03L
YKYFSGAMDTTSYR

SEQ ID NO: 19086 - protein, 15 aa, Severe acute respiratory syndrome coronavirus 2
  REGION 1..15: note = Table B: HLA-DRB1*01:01L HLA-DRB1*11:02L
ALIISVTSNYSGVVT

SEQ ID NO: 19087 - protein, 16 aa, Severe acute respiratory syndrome coronavirus 2
  REGION 1..16: note = Table B: HLA-DRB1*01:01L HLA-DRB3*02:01L HLA-DRB1*03:01L HLA-DQA1*05:05-B1*03:19L HLA-DPA1*01:03-B1*04:01L HLA-DRB1*10:01L
VDINKLCEEMLDNRAT

SEQ ID NO: 19088 - protein, 13 aa, Severe acute respiratory syndrome coronavirus 2
  REGION 1..13: note = Table B: HLA-DRB1*01:01L HLA-DRB3*02:01L HLA-DPA1*03:01-B1*04:02L HLA-DRB1*14:02L HLA-DQA1*01:01-B1*05:01L HLA-DRB1*11:01L HLA-DRB4*01:01L HLA-DPA1*02:01-B1*13:01L HLA-DRB1*07:01L
LPSYAAFATAQEA

SEQ ID NO: 19089 - protein, 14 aa, Severe acute respiratory syndrome coronavirus 2
  REGION 1..14: note = Table B: HLA-DRB1*01:01L HLA-DRB3*02:01L HLA-DRB1*13:01L HLA-DPA1*01:03-B1*04:02L HLA-DRB3*01:01L HLA-DPA1*01:03-B1*104:01L HLA-DRB1*15:03L
AQEAYEQAVANGDS

SEQ ID NO: 19090 - protein, 16 aa, Severe acute respiratory syndrome coronavirus 2
  REGION 1..16: note = Table B: HLA-DRB1*01:01L HLA-DPA1*01:03-B1*104:01L
LKKSLNVAKSEFDRDA

SEQ ID NO: 19091 - protein, 15 aa, Severe acute respiratory syndrome coronavirus 2
  REGION 1..15: note = Table B: HLA-DRB1*01:01L HLA-DRB1*08:77L HLA-DRB3*02:01L HLA-DPA1*01:03-B1*03:01L HLA-DPA1*03:01-B1*04:02L HLA-DQA1*05:01-B1*02:01L HLA-DPA1*01:03-B1*04:02L HLA-DPA1*02:01-B1*13:01L HLA-DPA1*01:03-B1*02:01L
  REGION 1..15: note = CONT. FROM ABOVE: HLA-DQA1*05:05-B1*03:01L HLA-DRB1*07:01L HLA-D RB1*10:01L
DQAMTQMYKQARSED

SEQ ID NO: 19092 - protein, 13 aa, Severe acute respiratory syndrome coronavirus 2
  REGION 1..13: note = Table B: HLA-DRB1*01:01L HLA-DRB1*07:01L HLA-DQA1*01:03-B1*06:01L
TQMYKQARSEDKR

SEQ ID NO: 19093 - protein, 16 aa, Severe acute respiratory syndrome coronavirus 2
  REGION 1..16: note = Table B: HLA-DRB1*01:01L HLA-DRB1*11:02L HLA-DRB1*11:03L HLA-DRB1*11:04L HLA-DQA1*01:01-B1*05:01L HLA-DQA1*05:05-B1*03:116L
DGTTFTYASALWEIQQ

SEQ ID NO: 19094 - protein, 15 aa, Severe acute respiratory syndrome coronavirus 2
  REGION 1..15: note = Table B: HLA-DRB1*01:01L HLA-DPA1*03:01-B1*04:02L HLA-DRB1*14:02L HLA-DRB1*11:01L HLA-DPA1*01:03-B1*02:01L HLA-DRB1*07:01L HLA-DRB1*08:02L
SALWEIQQVVDADSK

SEQ ID NO: 19095 - protein, 14 aa, Severe acute respiratory syndrome coronavirus 2
  REGION 1..14: note = Table B: HLA-DRB1*01:01L HLA-DRB1*11:02L HLA-DPA1*01:03-B1*02:01L HLA-DRB1*08:02L
QVVDADSKIVQLSE

SEQ ID NO: 19096 - protein, 12 aa, Severe acute respiratory syndrome coronavirus 2
  REGION 1..12: note = Table B: HLA-DRB1*01:01L HLA-DRB3*02:01L HLA-DPA1*01:03-B1*03:01L HLA-DPA1*03:01-B1*04:02L HLA-DQA1*01:01-B1*05:01L HLA-DRB1*08:01L HLA-DRB1*11:01L HLA-DRB1*12:02L HLA-DRB3*01:01L HLA-DPA1*02:01-B1*13:01L
  REGION 1..12: note = CONT. FROM ABOVE: HLA-DPA1*01:03-B1*104:01L HLA-DPA1*01:02-B1*04 :01L HLA-DRB1*07:01L HLA-DQA1*01:03-B1*06:01L
VKLQNNELSPVA

SEQ ID NO: 19097 - protein, 16 aa, Severe acute respiratory syndrome coronavirus 2
  REGION 1..16: note = Table B: HLA-DRB1*01:01L HLA-DRB1*11:03L HLA-DRB1*14:02L HLA-DRB1*11:01L HLA-DRB1*09:01L HLA-DRB3*01:01L HLA-DRB1*08:03L
DAAKAYKDYLASGGQP

SEQ ID NO: 19098 - protein, 14 aa, Severe acute respiratory syndrome coronavirus 2
  REGION 1..14: note = Table B: HLA-DRB1*01:01L
KAYKDYLASGGQPI

SEQ ID NO: 19099 - protein, 19 aa, Severe acute respiratory syndrome coronavirus 2
  REGION 1..19: note = Table B: HLA-DRB1*01:01L HLA-DPA1*01:03-B1*03:01L HLA-DRB1*14:02L HLA-DPA1*03:01-B1*105:01L HLA-DQA1*05:05-B1*03:01L
HPNPKGFCDLKGKYVQIPT

SEQ ID NO: 19100 - protein, 15 aa, Severe acute respiratory syndrome coronavirus 2
  REGION 1..15: note = Table B: HLA-DRB1*01:01L HLA-DRB1*11:01L HLA-DRB4*01:01L HLA-DQA1*05:05-B1*03:116L
DFGDFIQTTPGSGVP

SEQ ID NO: 19101 - protein, 15 aa, Severe acute respiratory syndrome coronavirus 2
  REGION 1..15: note = Table B: HLA-DRB1*01:01L HLA-DRB1*08:04L HLA-DRB1*11:01L HLA-DRB1*09:01L HLA-DPA1*02:01-B1*13:01L
DFIQTTPGSGVPVVD

SEQ ID NO: 19102 - protein, 15 aa, Severe acute respiratory syndrome coronavirus 2
  REGION 1..15: note = Table B: HLA-DRB1*01:01L
DSYYSLLMPILTLTR

SEQ ID NO: 19103 - protein, 14 aa, Severe acute respiratory syndrome coronavirus 2
  REGION 1..14: note = Table B: HLA-DRB1*01:01L
MPILTLTRALTAES

SEQ ID NO: 19104 - protein, 11 aa, Severe acute respiratory syndrome coronavirus 2
  REGION 1..11: note = Table B: HLA-DRB1*01:01L HLA-DRB1*01:02L HLA-DRB3*02:01L HLA-DRB1*08:01L HLA-DRB1*12:02L HLA-DRB1*04:08L
SHVDTDLTKPY

SEQ ID NO: 19105 - protein, 14 aa, Severe acute respiratory syndrome coronavirus 2
  REGION 1..14: note = Table B: HLA-DRB1*01:01L HLA-DRB1*03:01L HLA-DRB1*11:01L HLA-DRB1*07:01L
LGVVHNQDVNLHSS

SEQ ID NO: 19106 - protein, 14 aa, Severe acute respiratory syndrome coronavirus 2
  REGION 1..14: note = Table B: HLA-DRB1*01:01L HLA-DRB1*03:01L HLA-DQA1*01:01-B1*05:01L HLA-DRB1*11:01L HLA-DPA1*02:01-B1*13:01L HLA-DRB1*07:01L
GVVHNQDVNLHSSR

SEQ ID NO: 19107 - protein, 12 aa, Severe acute respiratory syndrome coronavirus 2
  REGION 1..12: note = Table B: HLA-DRB1*01:01L HLA-DRB5*01:01L HLA-DRB4*01:01L
VYAADPAMHAAS

SEQ ID NO: 19108 - protein, 12 aa, Severe acute respiratory syndrome coronavirus 2
  REGION 1..12: note = Table B: HLA-DRB1*01:01L HLA-DRB1*03:01L HLA-DRB1*11:02L HLA-DRB5*01:01L HLA-DRB1*13:01L HLA-DRB4*01:01L HLA-DPA1*01:03-B1*104:01L HLA-DRB1*08:02L
YAADPAMHAASG

SEQ ID NO: 19109 - protein, 13 aa, Severe acute respiratory syndrome coronavirus 2
  REGION 1..13: note = Table B: HLA-DRB1*01:01L
PAMHAASGNLLLD

SEQ ID NO: 19110 - protein, 13 aa, Severe acute respiratory syndrome coronavirus 2
  REGION 1..13: note = Table B: HLA-DRB1*01:01L
YDFAVSKGFFKEG

SEQ ID NO: 19111 - protein, 14 aa, Severe acute respiratory syndrome coronavirus 2
  REGION 1..14: note = Table B: HLA-DRB1*01:01L
LKSIAATRGATVVI

SEQ ID NO: 19112 - protein, 14 aa, Severe acute respiratory syndrome coronavirus 2
  REGION 1..14: note = Table B: HLA-DRB1*01:01L HLA-DRB1*11:01L
HRFYRLANECAQVL

SEQ ID NO: 19113 - protein, 12 aa, Severe acute respiratory syndrome coronavirus 2
  REGION 1..12: note = Table B: HLA-DRB1*01:01L HLA-DQA1*01-B1*05L HLA-DRB3*01:01L
ALLSTDGNKIAD

SEQ ID NO: 19114 - protein, 14 aa, Severe acute respiratory syndrome coronavirus 2
  REGION 1..14: note = Table B: HLA-DRB1*01:01L HLA-DRB1*14:01L HLA-DRB1*11:02L HLA-DRB1*11:03L HLA-DQA1*01-B1*05L HLA-DRB4*01:01L HLA-DRB1*09:01L HLA-DRB1*12:02L HLA-DRB3*01:01L HLA-DRB1*14:54L HLA-DRB1*07:01L HLA-DRB1*08:02L HLA-DRB1*08:03L
NSTYASQGLVASIK

SEQ ID NO: 19115 - protein, 14 aa, Severe acute respiratory syndrome coronavirus 2
  REGION 1..14: note = Table B: HLA-DRB1*01:01L HLA-DRB1*14:01L HLA-DRB1*11:03L HLA-DQA1*01-B1*05L HLA-DRB3*01:01L HLA-DRB1*14:54L HLA-DRB1*07:01L HLA-DRB1*08:02L HLA-DRB1*08:03L
STYASQGLVASIKN

SEQ ID NO: 19116 - protein, 15 aa, Severe acute respiratory syndrome coronavirus 2
  REGION 1..15: note = Table B: HLA-DRB1*01:01L HLA-DRB3*02:01L HLA-DPA1*03:01-B1*04:02L HLA-DRB1*11:03L HLA-DRB1*14:02L HLA-DQA1*05:01-B1*02:01L HLA-DPA1*01:03-B1*04:02L HLA-DPA1*01:03-B1*104:01L HLA-DPA1*01:02-B1*04:01L
  REGION 1..15: note = CONT. FROM ABOVE: HLA-DRB1*08:02L
SQGLVASIKNFKSVL

SEQ ID NO: 19117 - protein, 14 aa, Severe acute respiratory syndrome coronavirus 2
  REGION 1..14: note = Table B: HLA-DRB1*01:01L HLA-DRB1*11:02L HLA-DRB1*11:03L HLA-DRB1*11:04L HLA-DRB1*11:01L HLA-DRB1*07:01L HLA-DRB1*08:03L
VASIKNFKSVLYYQ

SEQ ID NO: 19118 - protein, 14 aa, Severe acute respiratory syndrome coronavirus 2
  REGION 1..14: note = Table B: HLA-DRB1*01:01L HLA-DRB1*11:02L HLA-DRB1*11:03L HLA-DRB1*11:04L HLA-DRB1*11:01L HLA-DRB1*08:03L
ASIKNFKSVLYYQN

SEQ ID NO: 19119 - protein, 15 aa, Severe acute respiratory syndrome coronavirus 2
  REGION 1..15: note = Table B: HLA-DRB1*01:01L HLA-DRB1*09:01L HLA-DRB1*12:02L
VMLTNDNTSRYWEPE

SEQ ID NO: 19120 - protein, 14 aa, Severe acute respiratory syndrome coronavirus 2
  REGION 1..14: note = Table B: HLA-DRB1*01:01L
EPEFYEAMYTPHTV

SEQ ID NO: 19121 - protein, 14 aa, Severe acute respiratory syndrome coronavirus 2
  REGION 1..14: note = Table B: HLA-DRB1*01:01L
EFYEAMYTPHTVLQ

SEQ ID NO: 19122 - protein, 13 aa, Severe acute respiratory syndrome coronavirus 2
  REGION 1..13: note = Table B: HLA-DRB1*01:01L HLA-DRB1*08:77L HLA-DRB3*02:01L HLA-DPA1*03:01-B1*04:02L HLA-DRB1*11:03L HLA-DRB1*14:02L HLA-DRB5*01:01L HLA-DRB4*01:01L HLA-DRB1*09:01L HLA-DPA1*01:03-B1*04:02L HLA-DRB3*01:01L
  REGION 1..13: note = CONT. FROM ABOVE: HLA-DPA1*01:03-B1*02:01L HLA-DPA1*01:03-B1*104 :01L HLA-DRB1*07:01L HLA-DRB1*08:02L
AGDYILANTCTER

SEQ ID NO: 19123 - protein, 14 aa, Severe acute respiratory syndrome coronavirus 2
  REGION 1..14: note = Table B: HLA-DRB1*01:01L HLA-DRB1*11:02L HLA-DRB1*13:01L HLA-DRB4*01:01L HLA-DPA1*01:03-B1*04:01L HLA-DRB1*09:01L HLA-DPA1*01:03-B1*02:01L HLA-DPA1*01:03-B1*104:01L HLA-DRB1*07:01L HLA-DRB1*08:02L
GDYILANTCTERLK

SEQ ID NO: 19124 - protein, 14 aa, Severe acute respiratory syndrome coronavirus 2
  REGION 1..14: note = Table B: HLA-DRB1*01:01L HLA-DRB3*02:01L HLA-DRB1*11:03L HLA-DRB4*01:01L HLA-DRB1*09:01L HLA-DRB3*01:01L HLA-DRB1*07:01L HLA-DRB1*08:02L HLA-DRB1*08:03L
LKLFAAETLKATEE

SEQ ID NO: 19125 - protein, 17 aa, Severe acute respiratory syndrome coronavirus 2
  REGION 1..17: note = Table B: HLA-DRB1*01:01L
DRELHLSWEVGKPRPPL

SEQ ID NO: 19126 - protein, 13 aa, Severe acute respiratory syndrome coronavirus 2
  REGION 1..13: note = Table B: HLA-DRB1*01:01L
VGDYFVLTSHTVM

SEQ ID NO: 19127 - protein, 14 aa, Severe acute respiratory syndrome coronavirus 2
  REGION 1..14: note = Table B: HLA-DRB1*01:01L HLA-DRB1*04:08L
SHTVMPLSAPTLVP

SEQ ID NO: 19128 - protein, 15 aa, Severe acute respiratory syndrome coronavirus 2
  REGION 1..15: note = Table B: HLA-DRB1*01:01L
VRITGLYPTLNISDE

SEQ ID NO: 19129 - protein, 12 aa, Severe acute respiratory syndrome coronavirus 2
  REGION 1..12: note = Table B: HLA-DRB1*01:01L HLA-DRB1*12:01L HLA-DRB1*10:01L HLA-DRB1*15:03L
KYSTLQGPPGTG

SEQ ID NO: 19130 - protein, 16 aa, Severe acute respiratory syndrome coronavirus 2
  REGION 1..16: note = Table B: HLA-DRB1*01:01L HLA-DRB3*02:01L HLA-DRB1*11:04L HLA-DRB1*07:01L
KSHFAIGLALYYPSAR

SEQ ID NO: 19131 - protein, 14 aa, Severe acute respiratory syndrome coronavirus 2
  REGION 1..14: note = Table B: HLA-DRB1*01:01L HLA-DRB1*07:01L
FDKFKVNSTLEQYV

SEQ ID NO: 19132 - protein, 11 aa, Severe acute respiratory syndrome coronavirus 2
  REGION 1..11: note = Table B: HLA-DRB1*01:01L HLA-DRB3*02:01L HLA-DRB1*14:01L HLA-DRB1*11:04L HLA-DRB1*12:02L HLA-DRB1*08:02L HLA-DRB1*15:01L
TNYDLSVVNAR

SEQ ID NO: 19133 - protein, 14 aa, Severe acute respiratory syndrome coronavirus 2
  REGION 1..14: note = Table B: HLA-DRB1*01:01L HLA-DRB1*11:04L HLA-DRB1*11:01L HLA-DRB1*07:01L
YDLSVVNARLRAKH

SEQ ID NO: 19134 - protein, 14 aa, Severe acute respiratory syndrome coronavirus 2
  REGION 1..14: note = Table B: HLA-DRB1*01:01L HLA-DRB1*03:01L HLA-DRB1*08:01L HLA-DRB1*11:01L HLA-DRB5*01:01L HLA-DRB4*01:01L HLA-DRB1*09:01L HLA-DPA1*01:03-B1*04:02L HLA-DRB3*01:01L HLA-DPA1*01:03-B1*104:01L HLA-DPA1*01:02-B1*04:01L
  REGION 1..14: note = CONT. FROM ABOVE: HLA-DRB1*07:01L HLA-DQA1*01:03-B1*06:01L HLA-D RB1*08:02L
HYVYIGDPAQLPAP

SEQ ID NO: 19135 - protein, 14 aa, Severe acute respiratory syndrome coronavirus 2
  REGION 1..14: note = Table B: HLA-DRB1*01:01L
KGTLEPEYFNSVCR

SEQ ID NO: 19136 - protein, 14 aa, Severe acute respiratory syndrome coronavirus 2
  REGION 1..14: note = Table B: HLA-DRB1*01:01L
KMFYKGVITHDVSS

SEQ ID NO: 19137 - protein, 15 aa, Severe acute respiratory syndrome coronavirus 2
  REGION 1..15: note = Table B: HLA-DRB1*01:01L HLA-DRB1*11:03L HLA-DPA1*03:01-B1*105:01L
VVREFLTRNPAWRKA

SEQ ID NO: 19138 - protein, 12 aa, Severe acute respiratory syndrome coronavirus 2
  REGION 1..12: note = Table B: HLA-DRB1*01:01L HLA-DRB1*08:04L HLA-DRB3*02:01L HLA-DPA1*01:03-B1*03:01L HLA-DRB1*07:01L
KILGLPTQTVDS

SEQ ID NO: 19139 - protein, 13 aa, Severe acute respiratory syndrome coronavirus 2
  REGION 1..13: note = Table B: HLA-DRB1*01:01L HLA-DRB3*02:01L HLA-DPA1*03:01-B1*04:02L HLA-DRB1*11:01L HLA-DRB4*01:01L HLA-DRB1*09:01L HLA-DPA1*01:03-B1*04:02L HLA-DRB3*01:01L HLA-DPA1*01:03-B1*104:01L HLA-DRB1*07:01L
DYVIFTQTTETAH

SEQ ID NO: 19140 - protein, 15 aa, Severe acute respiratory syndrome coronavirus 2
  REGION 1..15: note = Table B: HLA-DRB1*01:01L
KLQFTSLEIPRRNVA

SEQ ID NO: 19141 - protein, 15 aa, Severe acute respiratory syndrome coronavirus 2
  REGION 1..15: note = Table B: HLA-DRB1*01:01L HLA-DRB1*11:04L HLA-DRB1*11:01L HLA-DRB3*01:01L HLA-DRB1*08:03L
IPRRNVATLQAENVT

SEQ ID NO: 19142 - protein, 15 aa, Severe acute respiratory syndrome coronavirus 2
  REGION 1..15: note = Table B: HLA-DRB1*01:01L HLA-DRB1*11:01L
PNMFITREEAIRHVR

SEQ ID NO: 19143 - protein, 11 aa, Severe acute respiratory syndrome coronavirus 2
  REGION 1..11: note = Table B: HLA-DRB1*01:01L HLA-DRB1*01:02L
GYVDTPNNTDF

SEQ ID NO: 19144 - protein, 19 aa, Severe acute respiratory syndrome coronavirus 2
  REGION 1..19: note = Table B: HLA-DRB1*01:01L HLA-DRB1*14:02L HLA-DPA1*01:03-B1*04:02L
TPNNTDFSRVSAKPPPGDQ

SEQ ID NO: 19145 - protein, 15 aa, Severe acute respiratory syndrome coronavirus 2
  REGION 1..15: note = Table B: HLA-DRB1*01:01L HLA-DRB1*07:01L
VKAALLADKFPVLHD

SEQ ID NO: 19146 - protein, 13 aa, Severe acute respiratory syndrome coronavirus 2
  REGION 1..13: note = Table B: HLA-DRB1*01:01L HLA-DRB1*08:77L HLA-DRB3*02:01L HLA-DRB1*11:03L HLA-DRB1*08:02L
EELFYSYATHSDK

SEQ ID NO: 19147 - protein, 13 aa, Severe acute respiratory syndrome coronavirus 2
  REGION 1..13: note = Table B: HLA-DRB1*01:01L
TPAFDKSAFVNLK

SEQ ID NO: 19148 - protein, 15 aa, Severe acute respiratory syndrome coronavirus 2
  REGION 1..15: note = Table B: HLA-DRB1*01:01L HLA-DRB4*03:01NL HLA-DRB1*08:77L HLA-DRB1*03:01L HLA-DRB1*11:02L HLA-DRB1*11:03L HLA-DQA1*01:01-B1*05:01L HLA-DRB1*11:01L HLA-DRB4*01:01L HLA-DPA1*01:03-B1*04:01L HLA-DQA1*05:05-B1*03:116L
  REGION 1..15: note = CONT. FROM ABOVE: HLA-DRB1*04:10L HLA-DRB1*09:01L HLA-DRB1*12:02 L HLA-DPA1*01:03-B1*02:01L HLA-DPA1*01:03-B1*104:01L HLA-DRB1*07 :01L HLA-DRB1*10:01L HLA-DRB1*08:02L
LPFFYYSDSPCESHG

SEQ ID NO: 19149 - protein, 14 aa, Severe acute respiratory syndrome coronavirus 2
  REGION 1..14: note = Table B: HLA-DRB1*01:01L HLA-DRB1*11:04L HLA-DPA1*01:03-B1*104:01L HLA-DRB1*10:01L
FDTYNLWNTFTRLQ

SEQ ID NO: 19150 - protein, 14 aa, Severe acute respiratory syndrome coronavirus 2
  REGION 1..14: note = Table B: HLA-DRB1*01:01L HLA-DRB1*11:04L
DTYNLWNTFTRLQS

SEQ ID NO: 19151 - protein, 16 aa, Severe acute respiratory syndrome coronavirus 2
  REGION 1..16: note = Table B: HLA-DRB1*01:01L HLA-DRB3*02:01L HLA-DPA1*03:01-B1*04:02L HLA-DRB1*03:01L HLA-DRB1*14:02L HLA-DQA1*05:05-B1*03:19L HLA-DQA1*05:01-B1*02:01L HLA-DRB1*13:01L HLA-DPA1*01:03-B1*04:01L
  REGION 1..16: note = CONT. FROM ABOVE: HLA-DQA1*05:05-B1*03:116L HLA-DPA1*01:03-B1*04 :02L HLA-DRB1*14:54L HLA-DPA1*01:03-B1*104:01L HLA-DQA1*05:05-B1 *03:01L HLA-DRB1*10:01L
VAFELWAKRNIKPVPE

SEQ ID NO: 19152 - protein, 15 aa, Severe acute respiratory syndrome coronavirus 2
  REGION 1..15: note = Table B: HLA-DRB1*01:01L HLA-DRB3*02:01L HLA-DRB1*11:03L HLA-DRB1*11:04L HLA-DRB1*11:01L HLA-DPA1*03:01-B1*105:01L
AKRNIKPVPEVKILN

SEQ ID NO: 19153 - protein, 13 aa, Severe acute respiratory syndrome coronavirus 2
  REGION 1..13: note = Table B: HLA-DRB1*01:01L HLA-DRB1*03:01L HLA-DRB1*11:01L HLA-DPA1*01:03-B1*04:02L HLA-DPA1*01:03-B1*104:01L
KILNNLGVDIAAN

SEQ ID NO: 19154 - protein, 15 aa, Severe acute respiratory syndrome coronavirus 2
  REGION 1..15: note = Table B: HLA-DRB1*01:01L HLA-DRB3*02:01L
ANTVIWDYKRDAPAH

SEQ ID NO: 19155 - protein, 14 aa, Severe acute respiratory syndrome coronavirus 2
  REGION 1..14: note = Table B: HLA-DRB1*01:01L HLA-DPA1*01:03-B1*03:01L HLA-DRB1*03:01L HLA-DRB1*11:03L HLA-DRB1*11:04L HLA-DRB1*14:02L HLA-DRB1*11:01L HLA-DQA1*05:05-B1*03:19L HLA-DQA1*05:05-B1*03:01L
VDLFRNARNGVLIT

SEQ ID NO: 19156 - protein, 14 aa, Severe acute respiratory syndrome coronavirus 2
  REGION 1..14: note = Table B: HLA-DRB1*01:01L HLA-DPA1*03:01-B1*04:02L HLA-DRB1*11:02L HLA-DRB1*11:03L HLA-DRB1*14:02L HLA-DQA1*05:05-B1*03:19L HLA-DQA1*05:05-B1*03:116L HLA-DPA1*01:03-B1*04:02L HLA-DPA1*01:03-B1*02:01L
  REGION 1..14: note = CONT. FROM ABOVE: HLA-DQA1*05:05-B1*03:01L HLA-DRB1*07:01L HLA-D RB1*08:02L
TQFNYYKKVDGVVQ

SEQ ID NO: 19157 - protein, 14 aa, Severe acute respiratory syndrome coronavirus 2
  REGION 1..14: note = Table B: HLA-DRB1*01:01L
QAWQPGVAMPNLYK

SEQ ID NO: 19158 - protein, 14 aa, Severe acute respiratory syndrome coronavirus 2
  REGION 1..14: note = Table B: HLA-DRB1*01:01L HLA-DRB1*03:01L HLA-DRB4*01:01L HLA-DPA1*01:03-B1*04:01L HLA-DQA1*05:05-B1*03:116L HLA-DPA1*01:03-B1*02:01L HLA-DRB1*15:01L
DLQNYGDSATLPKG

SEQ ID NO: 19159 - protein, 16 aa, Severe acute respiratory syndrome coronavirus 2
  REGION 1..16: note = Table B: HLA-DRB1*01:01L HLA-DPA1*01:03-B1*04:02L
LNTLTLAVPYNMRVIH

SEQ ID NO: 19160 - protein, 17 aa, Severe acute respiratory syndrome coronavirus 2
  REGION 1..17: note = Table B: HLA-DRB1*01:01L HLA-DRB1*03:01L HLA-DRB1*11:01L HLA-DPA1*01:03-B1*02:01L HLA-DRB1*07:01L HLA-DRB1*08:02L
LPTGTLLVDSDLNDFVS

SEQ ID NO: 19161 - protein, 16 aa, Severe acute respiratory syndrome coronavirus 2
  REGION 1..16: note = Table B: HLA-DRB1*01:01L HLA-DRB1*03:01L HLA-DRB1*11:01L HLA-DRB3*01:01L
DSTLIGDCATVHTANK

SEQ ID NO: 19162 - protein, 14 aa, Severe acute respiratory syndrome coronavirus 2
  REGION 1..14: note = Table B: HLA-DRB1*01:01L HLA-DRB3*01:01L
GTAVMSLKEGQIND

SEQ ID NO: 19163 - protein, 14 aa, Severe acute respiratory syndrome coronavirus 2
  REGION 1..14: note = Table B: HLA-DRB1*01:01L HLA-DRB1*11:03L HLA-DRB1*11:04L HLA-DRB1*09:01L HLA-DRB1*07:01L
NVTWFHAIHVSGTN

SEQ ID NO: 19164 - protein, 15 aa, Severe acute respiratory syndrome coronavirus 2
  REGION 1..15: note = Table B: HLA-DRB1*01:01L HLA-DPA1*01:03-B1*04:01L HLA-DPA1*01:03-B1*02:01L HLA-DRB1*08:02L
IRGWIFGTTLDSKTQ

SEQ ID NO: 19165 - protein, 14 aa, Severe acute respiratory syndrome coronavirus 2
  REGION 1..14: note = Table B: HLA-DRB1*01:01L HLA-DRB1*11:04L HLA-DRB1*11:01L
QGNFKNLREFVFKN

SEQ ID NO: 19166 - protein, 14 aa, Severe acute respiratory syndrome coronavirus 2
  REGION 1..14: note = Table B: HLA-DRB1*01:01L HLA-DRB1*11:02L HLA-DPA1*01:03-B1*04:01L HLA-DPA1*01:03-B1*04:02L HLA-DPA1*01:03-B1*104:01L HLA-DPA1*01:02-B1*04:01L
SALEPLVDLPIGIN

SEQ ID NO: 19167 - protein, 15 aa, Severe acute respiratory syndrome coronavirus 2
  REGION 1..15: note = Table B: HLA-DRB1*01:01L HLA-DRB1*14:02L HLA-DQA1*05:05-B1*03:116L HLA-DPA1*01:03-B1*04:02L HLA-DPA1*03:01-B1*105:01L HLA-DPA1*01:03-B1*02:01L HLA-DQA1*05:05-B1*03:01L HLA-DRB1*08:02L HLA-DRB1*08:03L
FQTLLALHRSYLTPG

SEQ ID NO: 19168 - protein, 15 aa, Severe acute respiratory syndrome coronavirus 2
  REGION 1..15: note = Table B: HLA-DRB1*01:01L HLA-DRB1*03:01L HLA-DRB1*11:01L HLA-DRB4*01:01L HLA-DRB1*12:02L HLA-DPA1*01:02-B1*04:01L HLA-DRB1*10:01L
ALHRSYLTPGDSSSG

SEQ ID NO: 19169 - protein, 19 aa, Severe acute respiratory syndrome coronavirus 2
  REGION 1..19: note = Table B: HLA-DRB1*01:01L HLA-DRB3*02:01L HLA-DRB1*11:02L HLA-DRB1*09:01L HLA-DRB1*07:01L
TPGDSSSGWTAGAAAYYVG

SEQ ID NO: 19170 - protein, 15 aa, Severe acute respiratory syndrome coronavirus 2
  REGION 1..15: note = Table B: HLA-DRB1*01:01L HLA-DPA1*01:03-B1*104:01L HLA-DRB1*10:01L HLA-DRB1*08:03L HLA-DRB1*15:01L
VEKGIYQTSNFRVQP

SEQ ID NO: 19171 - protein, 13 aa, Severe acute respiratory syndrome coronavirus 2
  REGION 1..13: note = Table B: HLA-DRB1*01:01L HLA-DQA1*01:01-B1*05:01L HLA-DRB1*04:10L HLA-DRB3*01:01L
NATRFASVYAWNR

SEQ ID NO: 19172 - protein, 13 aa, Severe acute respiratory syndrome coronavirus 2
  REGION 1..13: note = Table B: HLA-DRB1*01:01L HLA-DRB1*11:03L HLA-DRB1*11:04L HLA-DRB1*08:03L
ADYSVLYNSASFS

SEQ ID NO: 19173 - protein, 12 aa, Severe acute respiratory syndrome coronavirus 2
  REGION 1..12: note = Table B: HLA-DRB1*01:01L HLA-DRB3*02:01L HLA-DPA1*01:03-B1*03:01L HLA-DRB1*14:02L HLA-DQA1*01:01-B1*05:01L HLA-DRB1*11:01L HLA-DRB5*01:01L HLA-DQA1*05:05-B1*03:19L HLA-DRB4*01:01L
  REGION 1..12: note = CONT. FROM ABOVE: HLA-DPA1*01:03-B1*04:01L HLA-DRB1*09:01L HLA-D PA1*01:03-B1*04:02L HLA-DRB3*01:01L HLA-DPA1*02:01-B1*13:01L HLA -DPA1*01:03-B1*104:01L HLA-DPA1*01:02-B1*04:01L HLA-DRB1*07:01L HLA-DRB1*15:01L
VIAWNSNNLDSK

SEQ ID NO: 19174 - protein, 13 aa, Severe acute respiratory syndrome coronavirus 2
  REGION 1..13: note = Table B: HLA-DRB1*01:01L
VLSFELLHAPATV

SEQ ID NO: 19175 - protein, 12 aa, Severe acute respiratory syndrome coronavirus 2
  REGION 1..12: note = Table B: HLA-DRB1*01:01L HLA-DRB1*10:01L HLA-DRB1*16:01L HLA-DRB1*15:03L
FNGLTGTGVLTE

SEQ ID NO: 19176 - protein, 16 aa, Severe acute respiratory syndrome coronavirus 2
  REGION 1..16: note = Table B: HLA-DRB1*01:01L HLA-DRB1*08:04L HLA-DRB3*02:01L HLA-DRB1*11:02L HLA-DRB1*11:03L HLA-DQA1*05:05-B1*03:19L HLA-DQA1*05:01-B1*02:01L HLA-DPA1*01:03-B1*04:01L HLA-DRB1*09:01L HLA-DPA1*01:03-B1*04:02L
  REGION 1..16: note = CONT. FROM ABOVE: HLA-DQA1*05:05-B1*03:01L HLA-DRB1*08:03L
SNKKFLPFQQFGRDIA

SEQ ID NO: 19177 - protein, 14 aa, Severe acute respiratory syndrome coronavirus 2
  REGION 1..14: note = Table B: HLA-DRB1*01:01L HLA-DRB1*15:01L
EVPVAIHADQLTPT

SEQ ID NO: 19178 - protein, 15 aa, Severe acute respiratory syndrome coronavirus 2
  REGION 1..15: note = Table B: HLA-DRB1*01:01L HLA-DRB1*11:02L HLA-DRB1*13:01L HLA-DPA1*01:03-B1*02:01L
VPVAIHADQLTPTWR

SEQ ID NO: 19179 - protein, 14 aa, Severe acute respiratory syndrome coronavirus 2
  REGION 1..14: note = Table B: HLA-DRB1*01:01L HLA-DPA1*03:01-B1*04:02L HLA-DRB1*14:02L HLA-DRB4*01:01L HLA-DPA1*01:03-B1*04:02L HLA-DPA1*01:03-B1*104:01L
IIAYTMSLGAENSV

SEQ ID NO: 19180 - protein, 15 aa, Severe acute respiratory syndrome coronavirus 2
  REGION 1..15: note = Table B: HLA-DRB1*01:01L
QLNRALTGIAVEQDK

SEQ ID NO: 19181 - protein, 14 aa, Severe acute respiratory syndrome coronavirus 2
  REGION 1..14: note = Table B: HLA-DRB1*01:01L HLA-DPA1*03:01-B1*04:02L HLA-DRB1*14:02L HLA-DRB4*01:01L HLA-DRB1*09:01L HLA-DPA1*01:03-B1*02:01L HLA-DRB1*08:02L
NRALTGIAVEQDKN

SEQ ID NO: 19182 - protein, 14 aa, Severe acute respiratory syndrome coronavirus 2
  REGION 1..14: note = Table B: HLA-DRB1*01:01L HLA-DRB1*07:01L
QKLIANQFNSAIGK

SEQ ID NO: 19183 - protein, 15 aa, Severe acute respiratory syndrome coronavirus 2
  REGION 1..15: note = Table B: HLA-DRB1*01:01L HLA-DRB3*02:01L HLA-DRB1*14:02L HLA-DRB1*11:01L HLA-DRB4*01:01L HLA-DRB1*09:01L
IQDSLSSTASALGKL

SEQ ID NO: 19184 - protein, 14 aa, Severe acute respiratory syndrome coronavirus 2
  REGION 1..14: note = Table B: HLA-DRB1*01:01L HLA-DRB3*02:01L HLA-DRB1*03:01L HLA-DRB1*08:01L HLA-DRB3*01:01L
ALGKLQDVVNQNAQ

SEQ ID NO: 19185 - protein, 16 aa, Severe acute respiratory syndrome coronavirus 2
  REGION 1..16: note = Table B: HLA-DRB1*01:01L HLA-DRB1*03:01L HLA-DRB1*13:01L HLA-DRB4*01:01L
AQALNTLVKQLSSNFG

SEQ ID NO: 19186 - protein, 14 aa, Severe acute respiratory syndrome coronavirus 2
  REGION 1..14: note = Table B: HLA-DRB1*01:01L
SSNFGAISSVLNDI

SEQ ID NO: 19187 - protein, 14 aa, Severe acute respiratory syndrome coronavirus 2
  REGION 1..14: note = Table B: HLA-DRB1*01:01L HLA-DRB1*09:01L HLA-DPA1*01:03-B1*04:02L HLA-DRB3*01:01L HLA-DRB1*07:01L
FGAISSVLNDILSR

SEQ ID NO: 19188 - protein, 14 aa, Severe acute respiratory syndrome coronavirus 2
  REGION 1..14: note = Table B: HLA-DRB1*01:01L HLA-DRB1*03:01L HLA-DRB1*14:01L HLA-DRB1*11:04L HLA-DRB1*11:01L HLA-DPA1*03:01-B1*105:01L
SRLDKVEAEVQIDR

SEQ ID NO: 19189 - protein, 14 aa, Severe acute respiratory syndrome coronavirus 2
  REGION 1..14: note = Table B: HLA-DRB1*01:01L HLA-DRB1*11:03L HLA-DRB1*11:04L HLA-DRB3*01:01L HLA-DRB1*07:01L HLA-DRB1*08:03L
LQSLQTYVTQQLIR

SEQ ID NO: 19190 - protein, 14 aa, Severe acute respiratory syndrome coronavirus 2
  REGION 1..14: note = Table B: HLA-DRB1*01:01L HLA-DRB1*08:77L HLA-DRB3*02:01L HLA-DRB1*03:01L HLA-DRB1*11:02L HLA-DRB1*11:03L HLA-DRB1*14:02M HLA-DQA1*01:01-B1*05:01L HLA-DRB5*01:01L HLA-DRB1*13:01L HLA-DRB4*01:01L HLA-DQA1*05:05-B1*03:116L HLA-DRB1*09:01L
  REGION 1..14: note = CONT. FROM ABOVE: HLA-DRB1*12:02L HLA-DRB3*01:01L HLA-DPA1*01:03 -B1*104:01L HLA-DRB1*07:01L HLA-DRB1*08:02L HLA-DRB1*08:03L
LQTYVTQQLIRAAE

SEQ ID NO: 19191 - protein, 14 aa, Severe acute respiratory syndrome coronavirus 2
  REGION 1..14: note = Table B: HLA-DRB1*01:01L HLA-DRB3*01:01L HLA-DPA1*01:03-B1*104:01L
TYVTQQLIRAAEIR

SEQ ID NO: 19192 - protein, 16 aa, Severe acute respiratory syndrome coronavirus 2
  REGION 1..16: note = Table B: HLA-DRB1*01:01L HLA-DRB1*08:77L HLA-DRB1*11:02L HLA-DRB1*11:04L HLA-DRB1*14:02L HLA-DRB1*11:01L HLA-DQA1*05:05-B1*03:19L HLA-DRB1*09:01L HLA-DRB3*01:01L HLA-DRB1*08:02L HLA-DRB1*08:03L
APHGVVFLHVTYVPAQ

SEQ ID NO: 19193 - protein, 14 aa, Severe acute respiratory syndrome coronavirus 2
  REGION 1..14: note = Table B: HLA-DRB1*01:01L HLA-DRB1*03:01L HLA-DRB1*11:02L HLA-DRB1*13:01L HLA-DRB4*01:01L HLA-DPA1*01:03-B1*04:01L
INASVVNIQKEIDR

SEQ ID NO: 19194 - protein, 14 aa, Severe acute respiratory syndrome coronavirus 2
  REGION 1..14: note = Table B: HLA-DRB1*01:01L HLA-DRB1*11:01L HLA-DRB1*13:01L
IYNKIVDEPEEHVQ

SEQ ID NO: 19195 - protein, 16 aa, Severe acute respiratory syndrome coronavirus 2
  REGION 1..16: note = Table B: HLA-DRB1*01:01L HLA-DRB3*02:01L HLA-DPA1*03:01-B1*04:02L HLA-DRB1*03:01L HLA-DRB4*01:01L HLA-DPA1*01:03-B1*04:01L HLA-DPA1*01:03-B1*04:02L HLA-DPA1*01:03-B1*02:01L HLA-DPA1*01:02-B1*04:01L
  REGION 1..16: note = CONT. FROM ABOVE: HLA-DRB1*08:02L
EPEEHVQIHTIDGSSG

SEQ ID NO: 19196 - protein, 14 aa, Severe acute respiratory syndrome coronavirus 2
  REGION 1..14: note = Table B: HLA-DRB1*01:01L HLA-DRB1*08:04L HLA-DPA1*01:03-B1*03:01L HLA-DQA1*01:03-B1*06:01L
VQIHTIDGSSGVVN

SEQ ID NO: 19197 - protein, 15 aa, Severe acute respiratory syndrome coronavirus 2
  REGION 1..15: note = Table B: HLA-DRB1*01:01L HLA-DRB1*08:01L HLA-DRB1*07:01L
SQRVAGDSGFAAYSR

SEQ ID NO: 19198 - protein, 13 aa, Severe acute respiratory syndrome coronavirus 2
  REGION 1..13: note = Table B: HLA-DRB1*01:01L HLA-DRB1*03:01L HLA-DQA1*05:01-B1*02:01L
GNYKLNTDHSSSS

SEQ ID NO: 19199 - protein, 14 aa, Severe acute respiratory syndrome coronavirus 2
  REGION 1..14: note = Table B: HLA-DRB1*01:01L HLA-DPA1*03:01-B1*04:02L HLA-DRB1*11:02L HLA-DRB1*09:01L HLA-DPA1*01:03-B1*04:02L HLA-DPA1*01:03-B1*104:01L HLA-DPA1*01:02-B1*04:01L HLA-DRB1*08:02L
NYKLNTDHSSSSDN

SEQ ID NO: 19200 - protein, 15 aa, Severe acute respiratory syndrome coronavirus 2
  REGION 1..15: note = Table B: HLA-DRB1*01:01L HLA-DRB1*13:01L HLA-DPA1*01:03-B1*04:01L HLA-DRB1*09:01L
INLIIKNLSKSLTEN

SEQ ID NO: 19201 - protein, 14 aa, Severe acute respiratory syndrome coronavirus 2
  REGION 1..14: note = Table B: HLA-DRB1*01:01L HLA-DRB1*03:01L
SGTYEGNSPFHPLA

SEQ ID NO: 19202 - protein, 13 aa, Severe acute respiratory syndrome coronavirus 2
  REGION 1..13: note = Table B: HLA-DRB1*01:01L HLA-DRB1*08:04L HLA-DQA1*05:05-B1*03:19L HLA-DPA1*02:01-B1*13:01L HLA-DPA1*03:01-B1*105:01L HLA-DQA1*05:05-B1*03:01L HLA-DQA1*01:03-B1*06:01L
WYIRVGARKSAPL

SEQ ID NO: 19203 - protein, 14 aa, Severe acute respiratory syndrome coronavirus 2
  REGION 1..14: note = Table B: HLA-DRB1*01:01L HLA-DRB1*07:01L HLA-DRB1*08:03L
EDFLEYHDVRVVLD

SEQ ID NO: 19204 - protein, 15 aa, Severe acute respiratory syndrome coronavirus 2
  REGION 1..15: note = Table B: HLA-DRB1*01:01L HLA-DRB1*08:02L
GVPINTNSSPDDQIG

SEQ ID NO: 19205 - protein, 14 aa, Severe acute respiratory syndrome coronavirus 2
  REGION 1..14: note = Table B: HLA-DRB1*01:01L HLA-DPA1*01:03-B1*03:01L HLA-DRB1*11:01L HLA-DPA1*01:03-B1*104:01L HLA-DRB1*04:08L HLA-DRB1*15:03L
RQKRTATKAYNVTQ

SEQ ID NO: 19206 - protein, 11 aa, Severe acute respiratory syndrome coronavirus 2
  REGION 1..11: note = Table B: HLA-DRB1*01:01L HLA-DRB1*16:01L
KAYNVTQAFGR

SEQ ID NO: 19207 - protein, 14 aa, Severe acute respiratory syndrome coronavirus 2
  REGION 1..14: note = Table B: HLA-DRB1*01:01L
GTWLTYTGAIKLDD

SEQ ID NO: 19208 - protein, 14 aa, Severe acute respiratory syndrome coronavirus 2
  REGION 1..14: note = Table B: HLA-DRB1*01:01L HLA-DRB1*13:01L HLA-DRB1*07:01L
DQVILLNKHIDAYK

SEQ ID NO: 19209 - protein, 16 aa, Severe acute respiratory syndrome coronavirus 2
  REGION 1..16: note = Table B: HLA-DRB1*01:01L
QQTVTLLPAADLDDFS

SEQ ID NO: 19210 - protein, 12 aa, Severe acute respiratory syndrome coronavirus 2
  REGION 1..12: note = Table B: HLA-DRB1*01:02L HLA-DQA1*05:05-B1*03:19L HLA-DPA1*03:01-B1*105:01L HLA-DQA1*05:05-B1*03:01L
LVPGFNEKTHVQ

SEQ ID NO: 19211 - protein, 13 aa, Severe acute respiratory syndrome coronavirus 2
  REGION 1..13: note = Table B: HLA-DRB1*01:02L HLA-DRB1*12:01L
THVQLSLPVLQVR

SEQ ID NO: 19212 - protein, 14 aa, Severe acute respiratory syndrome coronavirus 2
  REGION 1..14: note = Table B: HLA-DRB1*01:02L
HVQLSLPVLQVRDV

SEQ ID NO: 19213 - protein, 16 aa, Severe acute respiratory syndrome coronavirus 2
  REGION 1..16: note = Table B: HLA-DRB1*01:02L
VRGFGDSVEEVLSEAR

SEQ ID NO: 19214 - protein, 13 aa, Severe acute respiratory syndrome coronavirus 2
  REGION 1..13: note = Table B: HLA-DRB1*01:02L HLA-DRB1*08:04L HLA-DRB3*02:01L HLA-DQA1*01:01-B1*05:01L HLA-DRB1*08:01L HLA-DRB1*04:10L HLA-DRB1*09:01L HLA-DRB1*12:02L HLA-DRB1*14:54L HLA-DRB1*14:17L HLA-DRB1*04:08L
VEKGVLPQLEQPY

SEQ ID NO: 19215 - protein, 13 aa, Severe acute respiratory syndrome coronavirus 2
  REGION 1..13: note = Table B: HLA-DRB1*01:02L HLA-DRB1*08:01L
LPQLEQPYVFIKR

SEQ ID NO: 19216 - protein, 13 aa, Severe acute respiratory syndrome coronavirus 2
  REGION 1..13: note = Table B: HLA-DRB1*01:02L
RSDARTAPHGHVM

SEQ ID NO: 19217 - protein, 15 aa, Severe acute respiratory syndrome coronavirus 2
  REGION 1..15: note = Table B: HLA-DRB1*01:02L HLA-DRB1*12:01L HLA-DPA1*02:01-B1*13:01L HLA-DPA1*01:03-B1*104:01L HLA-DQA1*01:03-B1*06:01L HLA-DRB1*15:03L
APHGHVMVELVAELE

SEQ ID NO: 19218 - protein, 15 aa, Severe acute respiratory syndrome coronavirus 2
  REGION 1..15: note = Table B: HLA-DRB1*01:02L HLA-DPA1*01:03-B1*03:01L HLA-DPA1*03:01-B1*04:02L HLA-DPA1*01:03-B1*04:02L HLA-DQA1*05:05-B1*03:01L
GHVMVELVAELEGIQ

SEQ ID NO: 19219 - protein, 12 aa, Severe acute respiratory syndrome coronavirus 2
  REGION 1..12: note = Table B: HLA-DRB1*01:02L
LVAELEGIQYGR

SEQ ID NO: 19220 - protein, 14 aa, Severe acute respiratory syndrome coronavirus 2
  REGION 1..14: note = Table B: HLA-DRB1*01:02L
AELEGIQYGRSGET

SEQ ID NO: 19221 - protein, 14 aa, Severe acute respiratory syndrome coronavirus 2
  REGION 1..14: note = Table B: HLA-DRB1*01:02L HLA-DQA1*05:05-B1*03:01L
TLGVLVPHVGEIPV

SEQ ID NO: 19222 - protein, 12 aa, Severe acute respiratory syndrome coronavirus 2
  REGION 1..12: note = Table B: HLA-DRB1*01:02L HLA-DRB1*16:01L
PVAYRKVLLRKN

SEQ ID NO: 19223 - protein, 15 aa, Severe acute respiratory syndrome coronavirus 2
  REGION 1..15: note = Table B: HLA-DRB1*01:02L HLA-DRB1*08:01L
GNKGAGGHSYGADLK

SEQ ID NO: 19224 - protein, 12 aa, Severe acute respiratory syndrome coronavirus 2
  REGION 1..12: note = Table B: HLA-DRB1*01:02L HLA-DRB1*04:08L
NWNTKHSSGVTR

SEQ ID NO: 19225 - protein, 12 aa, Severe acute respiratory syndrome coronavirus 2
  REGION 1..12: note = Table B: HLA-DRB1*01:02L HLA-DRB1*04:08L
WNTKHSSGVTRE

SEQ ID NO: 19226 - protein, 14 aa, Severe acute respiratory syndrome coronavirus 2
  REGION 1..14: note = Table B: HLA-DRB1*01:02L
TKHSSGVTRELMRE

SEQ ID NO: 19227 - protein, 14 aa, Severe acute respiratory syndrome coronavirus 2
  REGION 1..14: note = Table B: HLA-DRB1*01:02L HLA-DQA1*05:05-B1*03:01L
DLLARAGKASCTLS

SEQ ID NO: 19228 - protein, 14 aa, Severe acute respiratory syndrome coronavirus 2
  REGION 1..14: note = Table B: HLA-DRB1*01:02L HLA-DPA1*02:01-B1*13:01L
EHEHEIAWYTERSE

SEQ ID NO: 19229 - protein, 12 aa, Severe acute respiratory syndrome coronavirus 2
  REGION 1..12: note = Table B: HLA-DRB1*01:02L HLA-DRB1*04:08L
QTPFEIKLAKKF

SEQ ID NO: 19230 - protein, 14 aa, Severe acute respiratory syndrome coronavirus 2
  REGION 1..14: note = Table B: HLA-DRB1*01:02L HLA-DQA1*05:05-B1*03:19L HLA-DQA1*05:05-B1*03:01L
FDTFNGECPNFVFP

SEQ ID NO: 19231 - protein, 11 aa, Severe acute respiratory syndrome coronavirus 2
  REGION 1..11: note = Table B: HLA-DRB1*01:02L HLA-DRB1*15:03L
FVFPLNSIIKT

SEQ ID NO: 19232 - protein, 14 aa, Severe acute respiratory syndrome coronavirus 2
  REGION 1..14: note = Table B: HLA-DRB1*01:02L
FPLNSIIKTIQPRV

SEQ ID NO: 19233 - protein, 12 aa, Severe acute respiratory syndrome coronavirus 2
  REGION 1..12: note = Table B: HLA-DRB1*01:02L
IKTIQPRVEKKK

SEQ ID NO: 19234 - protein, 13 aa, Severe acute respiratory syndrome coronavirus 2
  REGION 1..13: note = Table B: HLA-DRB1*01:02L HLA-DRB1*16:01L
TIQPRVEKKKLDG

SEQ ID NO: 19235 - protein, 15 aa, Severe acute respiratory syndrome coronavirus 2
  REGION 1..15: note = Table B: HLA-DRB1*01:02L HLA-DRB1*16:01L
IQPRVEKKKLDGFMG

SEQ ID NO: 19236 - protein, 15 aa, Severe acute respiratory syndrome coronavirus 2
  REGION 1..15: note = Table B: HLA-DRB1*01:02L
QPRVEKKKLDGFMGR

SEQ ID NO: 19237 - protein, 12 aa, Severe acute respiratory syndrome coronavirus 2
  REGION 1..12: note = Table B: HLA-DRB1*01:02L
KKKLDGFMGRIR

SEQ ID NO: 19238 - protein, 16 aa, Severe acute respiratory syndrome coronavirus 2
  REGION 1..16: note = Table B: HLA-DRB1*01:02L
KKLDGFMGRIRSVYPV

SEQ ID NO: 19239 - protein, 15 aa, Severe acute respiratory syndrome coronavirus 2
  REGION 1..15: note = Table B: HLA-DRB1*01:02L HLA-DRB1*14:01L
LDGFMGRIRSVYPVA

SEQ ID NO: 19240 - protein, 11 aa, Severe acute respiratory syndrome coronavirus 2
  REGION 1..11: note = Table B: HLA-DRB1*01:02L HLA-DPA1*01:03-B1*03:01L HLA-DRB1*12:01L HLA-DPA1*01:03-B1*02:01L HLA-DRB1*15:03L
SWQTGDFVKAT

SEQ ID NO: 19241 - protein, 14 aa, Severe acute respiratory syndrome coronavirus 2
  REGION 1..14: note = Table B: HLA-DRB1*01:02L HLA-DRB1*15:03L
TGDFVKATCEFCGT

SEQ ID NO: 19242 - protein, 14 aa, Severe acute respiratory syndrome coronavirus 2
  REGION 1..14: note = Table B: HLA-DRB1*01:02L HLA-DRB1*15:03L
GTENLTKEGATTCG

SEQ ID NO: 19243 - protein, 14 aa, Severe acute respiratory syndrome coronavirus 2
  REGION 1..14: note = Table B: HLA-DRB1*01:02L HLA-DRB1*15:03L
TENLTKEGATTCGY

SEQ ID NO: 19244 - protein, 14 aa, Severe acute respiratory syndrome coronavirus 2
  REGION 1..14: note = Table B: HLA-DRB1*01:02L
ENLTKEGATTCGYL

SEQ ID NO: 19245 - protein, 14 aa, Severe acute respiratory syndrome coronavirus 2
  REGION 1..14: note = Table B: HLA-DRB1*01:02L
HNESGLKTILRKGG

SEQ ID NO: 19246 - protein, 12 aa, Severe acute respiratory syndrome coronavirus 2
  REGION 1..12: note = Table B: HLA-DRB1*01:02L HLA-DRB1*14:01L HLA-DRB1*11:04L HLA-DRB1*08:01L HLA-DRB1*11:01L
SGLKTILRKGGR

SEQ ID NO: 19247 - protein, 14 aa, Severe acute respiratory syndrome coronavirus 2
  REGION 1..14: note = Table B: HLA-DRB1*01:02L HLA-DRB1*08:01L
HNKCAYWVPRASAN

SEQ ID NO: 19248 - protein, 14 aa, Severe acute respiratory syndrome coronavirus 2
  REGION 1..14: note = Table B: HLA-DRB1*01:02L
ANIGCNHTGVVGEG

SEQ ID NO: 19249 - protein, 15 aa, Severe acute respiratory syndrome coronavirus 2
  REGION 1..15: note = Table B: HLA-DRB1*01:02L HLA-DRB1*15:03L
GSEGLNDNLLEILQK

SEQ ID NO: 19250 - protein, 15 aa, Severe acute respiratory syndrome coronavirus 2
  REGION 1..15: note = Table B: HLA-DRB1*01:02L HLA-DPA1*01:03-B1*04:02L HLA-DRB1*16:01L HLA-DRB1*15:03L
SEGLNDNLLEILQKE

SEQ ID NO: 19251 - protein, 13 aa, Severe acute respiratory syndrome coronavirus 2
  REGION 1..13: note = Table B: HLA-DRB1*01:02L HLA-DRB1*16:01L
LNDNLLEILQKEK

SEQ ID NO: 19252 - protein, 13 aa, Severe acute respiratory syndrome coronavirus 2
  REGION 1..13: note = Table B: HLA-DRB1*01:02L
EKVNINIVGDFKL

SEQ ID NO: 19253 - protein, 13 aa, Severe acute respiratory syndrome coronavirus 2
  REGION 1..13: note = Table B: HLA-DRB1*01:02L HLA-DPA1*01:03-B1*03:01L
GDFKLNEEIAIIL

SEQ ID NO: 19254 - protein, 12 aa, Severe acute respiratory syndrome coronavirus 2
  REGION 1..12: note = Table B: HLA-DRB1*01:02L
KLNEEIAIILAS

SEQ ID NO: 19255 - protein, 13 aa, Severe acute respiratory syndrome coronavirus 2
  REGION 1..13: note = Table B: HLA-DRB1*01:02L HLA-DRB1*16:01L
AIILASFSASTSA

SEQ ID NO: 19256 - protein, 13 aa, Severe acute respiratory syndrome coronavirus 2
  REGION 1..13: note = Table B: HLA-DRB1*01:02L HLA-DRB1*12:01L HLA-DQA1*03:01-B1*03:02L
IILASFSASTSAF

SEQ ID NO: 19257 - protein, 12 aa, Severe acute respiratory syndrome coronavirus 2
  REGION 1..12: note = Table B: HLA-DRB1*01:02L HLA-DRB1*08:04L HLA-DRB3*02:01L HLA-DRB1*11:04L HLA-DRB1*04:08L
SAFVETVKGLDY

SEQ ID NO: 19258 - protein, 12 aa, Severe acute respiratory syndrome coronavirus 2
  REGION 1..12: note = Table B: HLA-DRB1*01:02L HLA-DRB1*15:03L
QIVESCGNFKVT

SEQ ID NO: 19259 - protein, 12 aa, Severe acute respiratory syndrome coronavirus 2
  REGION 1..12: note = Table B: HLA-DRB1*01:02L
IVESCGNFKVTK

SEQ ID NO: 19260 - protein, 16 aa, Severe acute respiratory syndrome coronavirus 2
  REGION 1..16: note = Table B: HLA-DRB1*01:02L
VTKGKAKKGAWNIGEQ

SEQ ID NO: 19261 - protein, 14 aa, Severe acute respiratory syndrome coronavirus 2
  REGION 1..14: note = Table B: HLA-DRB1*01:02L
KAKKGAWNIGEQKS

SEQ ID NO: 19262 - protein, 15 aa, Severe acute respiratory syndrome coronavirus 2
  REGION 1..15: note = Table B: HLA-DRB1*01:02L
AKKGAWNIGEQKSIL

SEQ ID NO: 19263 - protein, 13 aa, Severe acute respiratory syndrome coronavirus 2
  REGION 1..13: note = Table B: HLA-DRB1*01:02L HLA-DRB1*12:01L HLA-DPA1*03:01-B1*105:01L HLA-DQA1*05:05-B1*03:01L HLA-DRB1*15:03L
WNIGEQKSILSPL

SEQ ID NO: 19264 - protein, 11 aa, Severe acute respiratory syndrome coronavirus 2
  REGION 1..11: note = Table B: HLA-DRB1*01:02L HLA-DRB1*08:77L HLA-DRB3*02:01L
YAFASEAARVV

SEQ ID NO: 19265 - protein, 14 aa, Severe acute respiratory syndrome coronavirus 2
  REGION 1..14: note = Table B: HLA-DRB1*01:02L
ASEAARVVRSIFSR

SEQ ID NO: 19266 - protein, 14 aa, Severe acute respiratory syndrome coronavirus 2
  REGION 1..14: note = Table B: HLA-DRB1*01:02L
SEAARVVRSIFSRT

SEQ ID NO: 19267 - protein, 11 aa, Severe acute respiratory syndrome coronavirus 2
  REGION 1..11: note = Table B: HLA-DRB1*01:02L HLA-DRB1*12:01L HLA-DRB1*15:03L
RVVRSIFSRTL

SEQ ID NO: 19268 - protein, 11 aa, Severe acute respiratory syndrome coronavirus 2
  REGION 1..11: note = Table B: HLA-DRB1*01:02L HLA-DRB1*15:03L
VVRSIFSRTLE

SEQ ID NO: 19269 - protein, 13 aa, Severe acute respiratory syndrome coronavirus 2
  REGION 1..13: note = Table B: HLA-DRB1*01:02L HLA-DPA1*01:03-B1*03:01L HLA-DPA1*02:01-B1*13:01L HLA-DRB1*15:03L
SVRVLQKAAITIL

SEQ ID NO: 19270 - protein, 12 aa, Severe acute respiratory syndrome coronavirus 2
  REGION 1..12: note = Table B: HLA-DRB1*01:02L HLA-DRB3*02:01L
AAITILDGISQY

SEQ ID NO: 19271 - protein, 13 aa, Severe acute respiratory syndrome coronavirus 2
  REGION 1..13: note = Table B: HLA-DRB1*01:02L
LDGISQYSLRLID

SEQ ID NO: 19272 - protein, 12 aa, Severe acute respiratory syndrome coronavirus 2
  REGION 1..12: note = Table B: HLA-DRB1*01:02L
YSLRLIDAMMFT

SEQ ID NO: 19273 - protein, 12 aa, Severe acute respiratory syndrome coronavirus 2
  REGION 1..12: note = Table B: HLA-DRB1*01:02L HLA-DRB1*14:01L HLA-DRB1*12:01L
LRLIDAMMFTSD

SEQ ID NO: 19274 - protein, 14 aa, Severe acute respiratory syndrome coronavirus 2
  REGION 1..14: note = Table B: HLA-DRB1*01:02L
TSDLATNNLVVMAY

SEQ ID NO: 19275 - protein, 12 aa, Severe acute respiratory syndrome coronavirus 2
  REGION 1..12: note = Table B: HLA-DRB1*01:02L
VYEKLKPVLDWL

SEQ ID NO: 19276 - protein, 13 aa, Severe acute respiratory syndrome coronavirus 2
  REGION 1..13: note = Table B: HLA-DRB1*01:02L HLA-DRB1*12:01L HLA-DRB1*16:01L HLA-DRB1*04:08L
PVLDWLEEKFKEG

SEQ ID NO: 19277 - protein, 12 aa, Severe acute respiratory syndrome coronavirus 2
  REGION 1..12: note = Table B: HLA-DRB1*01:02L HLA-DRB1*08:04L HLA-DRB1*08:01L HLA-DRB1*11:01L HLA-DRB1*12:01L HLA-DPA1*02:01-B1*13:01L HLA-DPA1*01:03-B1*02:01L HLA-DQA1*01:03-B1*06:01L HLA-DQA1*02:01-B1*03:03L HLA-DRB1*15:03L
DWLEEKFKEGVE

SEQ ID NO: 19278 - protein, 13 aa, Severe acute respiratory syndrome coronavirus 2
  REGION 1..13: note = Table B: HLA-DRB1*01:02L
EEKFKEGVEFLRD

SEQ ID NO: 19279 - protein, 13 aa, Severe acute respiratory syndrome coronavirus 2
  REGION 1..13: note = Table B: HLA-DRB1*01:02L HLA-DPA1*01:03-B1*03:01L HLA-DPA1*03:01-B1*04:02L HLA-DQA1*05:01-B1*02:01L
FKEGVEFLRDGWE

SEQ ID NO: 19280 - protein, 14 aa, Severe acute respiratory syndrome coronavirus 2
  REGION 1..14: note = Table B: HLA-DRB1*01:02L HLA-DRB1*15:03L
VKFISTCACEIVGG

SEQ ID NO: 19281 - protein, 14 aa, Severe acute respiratory syndrome coronavirus 2
  REGION 1..14: note = Table B: HLA-DRB1*01:02L HLA-DPA1*01:03-B1*04:02L
KFISTCACEIVGGQ

SEQ ID NO: 19282 - protein, 14 aa, Severe acute respiratory syndrome coronavirus 2
  REGION 1..14: note = Table B: HLA-DRB1*01:02L HLA-DRB1*08:04L HLA-DRB1*14:01L HLA-DPA1*03:01-B1*105:01L HLA-DRB1*15:03L
QIVTCAKEIKESVQ

SEQ ID NO: 19283 - protein, 12 aa, Severe acute respiratory syndrome coronavirus 2
  REGION 1..12: note = Table B: HLA-DRB1*01:02L
KEIKESVQTFFK

SEQ ID NO: 19284 - protein, 14 aa, Severe acute respiratory syndrome coronavirus 2
  REGION 1..14: note = Table B: HLA-DRB1*01:02L
EIKESVQTFFKLVN

SEQ ID NO: 19285 - protein, 12 aa, Severe acute respiratory syndrome coronavirus 2
  REGION 1..12: note = Table B: HLA-DRB1*01:02L HLA-DRB1*14:01L HLA-DRB1*08:01L HLA-DRB1*12:01L HLA-DRB1*04:08L
QTFFKLVNKFLA

SEQ ID NO: 19286 - protein, 11 aa, Severe acute respiratory syndrome coronavirus 2
  REGION 1..11: note = Table B: HLA-DRB1*01:02L HLA-DRB1*14:02L
FFKLVNKFLAL

SEQ ID NO: 19287 - protein, 13 aa, Severe acute respiratory syndrome coronavirus 2
  REGION 1..13: note = Table B: HLA-DRB1*01:02L HLA-DPA1*03:01-B1*04:02L HLA-DRB1*12:01L HLA-DPA1*02:01-B1*13:01L HLA-DPA1*03:01-B1*105:01L HLA-DRB1*16:01L HLA-DRB1*15:03L
VNKFLALCADSII

SEQ ID NO: 19288 - protein, 14 aa, Severe acute respiratory syndrome coronavirus 2
  REGION 1..14: note = Table B: HLA-DRB1*01:02L HLA-DRB1*12:01L HLA-DRB1*16:01L
NKFLALCADSIIIG

SEQ ID NO: 19289 - protein, 14 aa, Severe acute respiratory syndrome coronavirus 2
  REGION 1..14: note = Table B: HLA-DRB1*01:02L
KFLALCADSIIIGG

SEQ ID NO: 19290 - protein, 14 aa, Severe acute respiratory syndrome coronavirus 2
  REGION 1..14: note = Table B: HLA-DRB1*01:02L HLA-DPA1*01:03-B1*03:01L HLA-DRB1*12:01L HLA-DPA1*03:01-B1*105:01L
AKLKALNLGETFVT

SEQ ID NO: 19291 - protein, 13 aa, Severe acute respiratory syndrome coronavirus 2
  REGION 1..13: note = Table B: HLA-DRB1*01:02L HLA-DQA1*05:05-B1*03:19L
LNLGETFVTHSKG

SEQ ID NO: 19292 - protein, 13 aa, Severe acute respiratory syndrome coronavirus 2
  REGION 1..13: note = Table B: HLA-DRB1*01:02L
SKGLYRKCVKSRE

SEQ ID NO: 19293 - protein, 13 aa, Severe acute respiratory syndrome coronavirus 2
  REGION 1..13: note = Table B: HLA-DRB1*01:02L
KGLYRKCVKSREE

SEQ ID NO: 19294 - protein, 13 aa, Severe acute respiratory syndrome coronavirus 2
  REGION 1..13: note = Table B: HLA-DRB1*01:02L HLA-DRB1*12:01L
PKEIIFLEGETLP

SEQ ID NO: 19295 - protein, 17 aa, Severe acute respiratory syndrome coronavirus 2
  REGION 1..17: note = Table B: HLA-DRB1*01:02L HLA-DRB1*08:01L HLA-DRB1*04:10L HLA-DRB1*15:03L
QPLEQPTSEAVEAPLVG

SEQ ID NO: 19296 - protein, 13 aa, Severe acute respiratory syndrome coronavirus 2
  REGION 1..13: note = Table B: HLA-DRB1*01:02L HLA-DPA1*03:01-B1*105:01L HLA-DRB1*16:01L HLA-DRB1*15:03L
EKYCALAPNMMVT

SEQ ID NO: 19297 - protein, 13 aa, Severe acute respiratory syndrome coronavirus 2
  REGION 1..13: note = Table B: HLA-DRB1*01:02L
LAPNMMVTNNTFT

SEQ ID NO: 19298 - protein, 12 aa, Severe acute respiratory syndrome coronavirus 2
  REGION 1..12: note = Table B: HLA-DRB1*01:02L
MMVTNNTFTLKG

SEQ ID NO: 19299 - protein, 13 aa, Severe acute respiratory syndrome coronavirus 2
  REGION 1..13: note = Table B: HLA-DRB1*01:02L HLA-DPA1*02:01-B1*13:01L HLA-DPA1*01:02-B1*04:01L
FGDDTVIEVQGYK

SEQ ID NO: 19300 - protein, 13 aa, Severe acute respiratory syndrome coronavirus 2
  REGION 1..13: note = Table B: HLA-DRB1*01:02L HLA-DRB1*15:03L
ERIDKVLNEKCSA

SEQ ID NO: 19301 - protein, 13 aa, Severe acute respiratory syndrome coronavirus 2
  REGION 1..13: note = Table B: HLA-DRB1*01:02L HLA-DPA1*01:03-B1*03:01L HLA-DRB1*14:01L HLA-DRB1*12:01L HLA-DPA1*02:01-B1*13:01L HLA-DPA1*03:01-B1*105:01L HLA-DQA1*03:01-B1*03:02L HLA-DRB1*16:01L HLA-DQA1*01:03-B1*06:01L HLA-DRB1*15:03L
IDKVLNEKCSAYT

SEQ ID NO: 19302 - protein, 14 aa, Severe acute respiratory syndrome coronavirus 2
  REGION 1..14: note = Table B: HLA-DRB1*01:02L HLA-DPA1*03:01-B1*105:01L HLA-DQA1*01:03-B1*06:01L HLA-DRB1*15:03L
DKVLNEKCSAYTVE

SEQ ID NO: 19303 - protein, 12 aa, Severe acute respiratory syndrome coronavirus 2
  REGION 1..12: note = Table B: HLA-DRB1*01:02L HLA-DRB1*12:01L HLA-DRB1*10:01L HLA-DRB1*16:01L HLA-DRB1*15:03L
AYTVELGTEVNE

SEQ ID NO: 19304 - protein, 13 aa, Severe acute respiratory syndrome coronavirus 2
  REGION 1..13: note = Table B: HLA-DRB1*01:02L
YTVELGTEVNEFA

SEQ ID NO: 19305 - protein, 15 aa, Severe acute respiratory syndrome coronavirus 2
  REGION 1..15: note = Table B: HLA-DRB1*01:02L HLA-DPA1*01:03-B1*03:01L HLA-DRB1*12:01L HLA-DPA1*02:01-B1*13:01L HLA-DQA1*05:05-B1*03:01L HLA-DRB1*04:08L HLA-DRB1*15:03L
QPVSELLTPLGIDLD

SEQ ID NO: 19306 - protein, 12 aa, Severe acute respiratory syndrome coronavirus 2
  REGION 1..12: note = Table B: HLA-DRB1*01:02L HLA-DRB1*12:01L HLA-DRB1*04:08L
FDESGEFKLASH

SEQ ID NO: 19307 - protein, 13 aa, Severe acute respiratory syndrome coronavirus 2
  REGION 1..13: note = Table B: HLA-DRB1*01:02L HLA-DRB1*08:04L HLA-DRB3*02:01L HLA-DRB1*08:01L HLA-DRB1*04:08L
DESGEFKLASHMY

SEQ ID NO: 19308 - protein, 14 aa, Severe acute respiratory syndrome coronavirus 2
  REGION 1..14: note = Table B: HLA-DRB1*01:02L
ESGEFKLASHMYCS

SEQ ID NO: 19309 - protein, 16 aa, Severe acute respiratory syndrome coronavirus 2
  REGION 1..16: note = Table B: HLA-DRB1*01:02L HLA-DPA1*01:03-B1*02:01L HLA-DRB1*04:08L
GEFKLASHMYCSFYPP

SEQ ID NO: 19310 - protein, 12 aa, Severe acute respiratory syndrome coronavirus 2
  REGION 1..12: note = Table B: HLA-DRB1*01:02L HLA-DRB3*02:01L HLA-DRB1*14:01L HLA-DRB1*08:01L HLA-DPA1*01:03-B1*04:01L HLA-DRB1*04:10L HLA-DRB1*12:02L HLA-DPA1*02:01-B1*13:01L HLA-DRB1*14:54L HLA-DRB1*07:01L HLA-DRB1*10:01L HLA-DRB1*04:08L
GTEDDYQGKPLE

SEQ ID NO: 19311 - protein, 13 aa, Severe acute respiratory syndrome coronavirus 2
  REGION 1..13: note = Table B: HLA-DRB1*01:02L HLA-DRB1*08:04L
TEDDYQGKPLEFG

SEQ ID NO: 19312 - protein, 14 aa, Severe acute respiratory syndrome coronavirus 2
  REGION 1..14: note = Table B: HLA-DRB1*01:02L
EFGATSAALQPEEE

SEQ ID NO: 19313 - protein, 16 aa, Severe acute respiratory syndrome coronavirus 2
  REGION 1..16: note = Table B: HLA-DRB1*01:02L HLA-DPA1*01:03-B1*04:02L
EEDWLDDDSQQTVGQQ

SEQ ID NO: 19314 - protein, 12 aa, Severe acute respiratory syndrome coronavirus 2
  REGION 1..12: note = Table B: HLA-DRB1*01:02L HLA-DPA1*01:03-B1*03:01L
TIVEVQPQLEME

SEQ ID NO: 19315 - protein, 12 aa, Severe acute respiratory syndrome coronavirus 2
  REGION 1..12: note = Table B: HLA-DRB1*01:02L HLA-DRB3*02:01L HLA-DRB1*12:02L HLA-DQA1*03:01-B1*03:02L HLA-DQA1*05:05-B1*03:01L
VQTIEVNSFSGY

SEQ ID NO: 19316 - protein, 11 aa, Severe acute respiratory syndrome coronavirus 2
  REGION 1..11: note = Table B: HLA-DRB1*01:02L HLA-DRB3*02:01L
SGYLKLTDNVY

SEQ ID NO: 19317 - protein, 11 aa, Severe acute respiratory syndrome coronavirus 2
  REGION 1..11: note = Table B: HLA-DRB1*01:02L
GYLKLTDNVYI

SEQ ID NO: 19318 - protein, 10 aa, Severe acute respiratory syndrome coronavirus 2
  REGION 1..10: note = Table B: HLA-DRB1*01:02L HLA-DRB1*12:01L HLA-DRB1*16:01L HLA-DQA1*02:01-B1*03:03L HLA-DRB1*15:03L
LKLTDNVYIK

SEQ ID NO: 19319 - protein, 14 aa, Severe acute respiratory syndrome coronavirus 2
  REGION 1..14: note = Table B: HLA-DRB1*01:02L
KNADIVEEAKKVKP

SEQ ID NO: 19320 - protein, 12 aa, Severe acute respiratory syndrome coronavirus 2
  REGION 1..12: note = Table B: HLA-DRB1*01:02L HLA-DPA1*01:03-B1*03:01L HLA-DRB1*08:01L HLA-DPA1*01:03-B1*04:02L
GVAGALNKATNN

SEQ ID NO: 19321 - protein, 15 aa, Severe acute respiratory syndrome coronavirus 2
  REGION 1..15: note = Table B: HLA-DRB1*01:02L HLA-DRB1*04:10L HLA-DRB1*12:01L
LNKATNNAMQVESDD

SEQ ID NO: 19322 - protein, 14 aa, Severe acute respiratory syndrome coronavirus 2
  REGION 1..14: note = Table B: HLA-DRB1*01:02L HLA-DRB1*08:01L
HNLAKHCLHVVGPN

SEQ ID NO: 19323 - protein, 14 aa, Severe acute respiratory syndrome coronavirus 2
  REGION 1..14: note = Table B: HLA-DRB1*01:02L HLA-DPA1*02:01-B1*13:01L
LAKHCLHVVGPNVN

SEQ ID NO: 19324 - protein, 14 aa, Severe acute respiratory syndrome coronavirus 2
  REGION 1..14: note = Table B: HLA-DRB1*01:02L HLA-DRB1*04:08L
AKHCLHVVGPNVNK

SEQ ID NO: 19325 - protein, 13 aa, Severe acute respiratory syndrome coronavirus 2
  REGION 1..13: note = Table B: HLA-DRB1*01:02L HLA-DQA1*05:05-B1*03:19L HLA-DPA1*03:01-B1*105:01L
LHVVGPNVNKGED

SEQ ID NO: 19326 - protein, 13 aa, Severe acute respiratory syndrome coronavirus 2
  REGION 1..13: note = Table B: HLA-DRB1*01:02L HLA-DRB1*08:04L HLA-DRB1*08:77L HLA-DRB3*02:01L HLA-DPA1*03:01-B1*04:02L HLA-DRB1*14:01L HLA-DRB1*11:03L HLA-DRB1*11:04L HLA-DRB1*14:02L HLA-DRB1*08:01L HLA-DRB1*11:01L HLA-DRB5*01:01L HLA-DPA1*01:03-B1*04:01L
  REGION 1..13: note = CONT. FROM ABOVE: HLA-DQA1*05:05-B1*03:116L HLA-DRB1*04:10L HLA- DRB1*09:01L HLA-DPA1*01:03-B1*04:02L HLA-DRB1*12:02L HLA-DRB3*01 :01L HLA-DPA1*02:01-B1*13:01L HLA-DPA1*01:03-B1*104:01L HLA-DPA1 *01:02-B1*04:01L HLA-DRB1*07:01L HLA-DRB1*10:01L HLA-DRB1*04:08L
  REGION 1..13: note = CONT. FROM ABOVE: HLA-DRB1*08:03L HLA-DRB1*15:03L
VVGPNVNKGEDIQ

SEQ ID NO: 19327 - protein, 14 aa, Severe acute respiratory syndrome coronavirus 2
  REGION 1..14: note = Table B: HLA-DRB1*01:02L HLA-DRB1*15:03L
NFNQHEVLLAPLLS

SEQ ID NO: 19328 - protein, 13 aa, Severe acute respiratory syndrome coronavirus 2
  REGION 1..13: note = Table B: HLA-DRB1*01:02L
VLLAPLLSAGIFG

SEQ ID NO: 19329 - protein, 14 aa, Severe acute respiratory syndrome coronavirus 2
  REGION 1..14: note = Table B: HLA-DRB1*01:02L
SLRVCVDTVRTNVY

SEQ ID NO: 19330 - protein, 14 aa, Severe acute respiratory syndrome coronavirus 2
  REGION 1..14: note = Table B: HLA-DRB1*01:02L HLA-DPA1*01:03-B1*03:01L HLA-DRB1*14:01L HLA-DPA1*01:03-B1*04:02L HLA-DRB1*12:01L HLA-DPA1*02:01-B1*13:01L HLA-DPA1*01:03-B1*104:01L HLA-DQA1*05:05-B1*03:01L
VDTVRTNVYLAVFD

SEQ ID NO: 19331 - protein, 15 aa, Severe acute respiratory syndrome coronavirus 2
  REGION 1..15: note = Table B: HLA-DRB1*01:02L
ITESKPSVEQRKQDD

SEQ ID NO: 19332 - protein, 14 aa, Severe acute respiratory syndrome coronavirus 2
  REGION 1..14: note = Table B: HLA-DRB1*01:02L
PSVEQRKQDDKKIK

SEQ ID NO: 19333 - protein, 11 aa, Severe acute respiratory syndrome coronavirus 2
  REGION 1..11: note = Table B: HLA-DRB1*01:02L HLA-DRB1*03:01L HLA-DRB1*09:01L HLA-DRB1*08:02L
EVTTTLEETKF

SEQ ID NO: 19334 - protein, 12 aa, Severe acute respiratory syndrome coronavirus 2
  REGION 1..12: note = Table B: HLA-DRB1*01:02L HLA-DRB1*14:01L
ETKFLTENLLLY

SEQ ID NO: 19335 - protein, 14 aa, Severe acute respiratory syndrome coronavirus 2
  REGION 1..14: note = Table B: HLA-DRB1*01:02L HLA-DQA1*01-B1*05L HLA-DRB1*16:01L
NLLLYIDINGNLHP

SEQ ID NO: 19336 - protein, 13 aa, Severe acute respiratory syndrome coronavirus 2
  REGION 1..13: note = Table B: HLA-DRB1*01:02L HLA-DPA1*01:03-B1*03:01L HLA-DRB1*15:03L
IDINGNLHPDSAT

SEQ ID NO: 19337 - protein, 14 aa, Severe acute respiratory syndrome coronavirus 2
  REGION 1..14: note = Table B: HLA-DRB1*01:02L HLA-DRB1*16:01L
ATLVSDIDITFLKK

SEQ ID NO: 19338 - protein, 14 aa, Severe acute respiratory syndrome coronavirus 2
  REGION 1..14: note = Table B: HLA-DRB1*01:02L HLA-DRB1*03:01L
TLVSDIDITFLKKD

SEQ ID NO: 19339 - protein, 12 aa, Severe acute respiratory syndrome coronavirus 2
  REGION 1..12: note = Table B: HLA-DRB1*01:02L
GTTEMLAKALRK

SEQ ID NO: 19340 - protein, 14 aa, Severe acute respiratory syndrome coronavirus 2
  REGION 1..14: note = Table B: HLA-DRB1*01:02L HLA-DRB1*12:01L HLA-DRB1*16:01L HLA-DRB1*15:03L
TTEMLAKALRKVPT

SEQ ID NO: 19341 - protein, 14 aa, Severe acute respiratory syndrome coronavirus 2
  REGION 1..14: note = Table B: HLA-DRB1*01:02L
TEMLAKALRKVPTD

SEQ ID NO: 19342 - protein, 14 aa, Severe acute respiratory syndrome coronavirus 2
  REGION 1..14: note = Table B: HLA-DRB1*01:02L HLA-DRB1*08:04L HLA-DRB1*14:01L HLA-DQA1*01:03-B1*06:01L HLA-DRB1*04:08L HLA-DQA1*02:01-B1*03:03L
EMLAKALRKVPTDN

SEQ ID NO: 19343 - protein, 12 aa, Severe acute respiratory syndrome coronavirus 2
  REGION 1..12: note = Table B: HLA-DRB1*01:02L
AKALRKVPTDNY

SEQ ID NO: 19344 - protein, 15 aa, Severe acute respiratory syndrome coronavirus 2
  REGION 1..15: note = Table B: HLA-DRB1*01:02L
KTVLKKCKSAFYILP

SEQ ID NO: 19345 - protein, 14 aa, Severe acute respiratory syndrome coronavirus 2
  REGION 1..14: note = Table B: HLA-DRB1*01:02L HLA-DRB1*08:01L HLA-DRB1*04:08L
VSWNLREMLAHAEE

SEQ ID NO: 19346 - protein, 15 aa, Severe acute respiratory syndrome coronavirus 2
  REGION 1..15: note = Table B: HLA-DRB1*01:02L
RKLMPVCVETKAIVS

SEQ ID NO: 19347 - protein, 16 aa, Severe acute respiratory syndrome coronavirus 2
  REGION 1..16: note = Table B: HLA-DRB1*01:02L
MPVCVETKAIVSTIQR

SEQ ID NO: 19348 - protein, 13 aa, Severe acute respiratory syndrome coronavirus 2
  REGION 1..13: note = Table B: HLA-DRB1*01:02L
VETKAIVSTIQRK

SEQ ID NO: 19349 - protein, 12 aa, Severe acute respiratory syndrome coronavirus 2
  REGION 1..12: note = Table B: HLA-DRB1*01:02L HLA-DRB1*12:01L HLA-DRB1*16:01L HLA-DRB1*15:03L
TIQRKYKGIKIQ

SEQ ID NO: 19350 - protein, 14 aa, Severe acute respiratory syndrome coronavirus 2
  REGION 1..14: note = Table B: HLA-DRB1*01:02L
EGVVDYGARFYFYT

SEQ ID NO: 19351 - protein, 14 aa, Severe acute respiratory syndrome coronavirus 2
  REGION 1..14: note = Table B: HLA-DRB1*01:02L
VVDYGARFYFYTSK

SEQ ID NO: 19352 - protein, 13 aa, Severe acute respiratory syndrome coronavirus 2
  REGION 1..13: note = Table B: HLA-DRB1*01:02L HLA-DPA1*02:01-B1*13:01L
INTLNDLNETLVT

SEQ ID NO: 19353 - protein, 13 aa, Severe acute respiratory syndrome coronavirus 2
  REGION 1..13: note = Table B: HLA-DRB1*01:02L HLA-DRB1*08:01L HLA-DRB1*04:08L
YVTHGLNLEEAAR

SEQ ID NO: 19354 - protein, 12 aa, Severe acute respiratory syndrome coronavirus 2
  REGION 1..12: note = Table B: HLA-DRB1*01:02L HLA-DQA1*05:05-B1*03:01L
THGLNLEEAARY

SEQ ID NO: 19355 - protein, 12 aa, Severe acute respiratory syndrome coronavirus 2
  REGION 1..12: note = Table B: HLA-DRB1*01:02L
HGLNLEEAARYM

SEQ ID NO: 19356 - protein, 12 aa, Severe acute respiratory syndrome coronavirus 2
  REGION 1..12: note = Table B: HLA-DRB1*01:02L
GLNLEEAARYMR

SEQ ID NO: 19357 - protein, 14 aa, Severe acute respiratory syndrome coronavirus 2
  REGION 1..14: note = Table B: HLA-DRB1*01:02L HLA-DRB3*01:01L
LNLEEAARYMRSLK

SEQ ID NO: 19358 - protein, 14 aa, Severe acute respiratory syndrome coronavirus 2
  REGION 1..14: note = Table B: HLA-DRB1*01:02L HLA-DRB1*12:01L
PDAVTAYNGYLTSS

SEQ ID NO: 19359 - protein, 13 aa, Severe acute respiratory syndrome coronavirus 2
  REGION 1..13: note = Table B: HLA-DRB1*01:02L HLA-DRB1*14:17L
AVTAYNGYLTSSS

SEQ ID NO: 19360 - protein, 14 aa, Severe acute respiratory syndrome coronavirus 2
  REGION 1..14: note = Table B: HLA-DRB1*01:02L HLA-DPA1*03:01-B1*105:01L
SLAGSYKDWSYSGQ

SEQ ID NO: 19361 - protein, 14 aa, Severe acute respiratory syndrome coronavirus 2
  REGION 1..14: note = Table B: HLA-DRB1*01:02L HLA-DQA1*01:03-B1*06:01L
LAGSYKDWSYSGQS

SEQ ID NO: 19362 - protein, 14 aa, Severe acute respiratory syndrome coronavirus 2
  REGION 1..14: note = Table B: HLA-DRB1*01:02L HLA-DRB1*08:01L HLA-DPA1*01:03-B1*04:02L
AGSYKDWSYSGQST

SEQ ID NO: 19363 - protein, 14 aa, Severe acute respiratory syndrome coronavirus 2
  REGION 1..14: note = Table B: HLA-DRB1*01:02L
SGQSTQLGIEFLKR

SEQ ID NO: 19364 - protein, 14 aa, Severe acute respiratory syndrome coronavirus 2
  REGION 1..14: note = Table B: HLA-DRB1*01:02L
GQSTQLGIEFLKRG

SEQ ID NO: 19365 - protein, 13 aa, Severe acute respiratory syndrome coronavirus 2
  REGION 1..13: note = Table B: HLA-DRB1*01:02L HLA-DRB1*14:01L HLA-DRB1*12:01L HLA-DRB1*04:08L HLA-DRB1*15:03L
GIEFLKRGDKSVY

SEQ ID NO: 19366 - protein, 14 aa, Severe acute respiratory syndrome coronavirus 2
  REGION 1..14: note = Table B: HLA-DRB1*01:02L HLA-DRB1*14:01L HLA-DRB1*15:03L
IEFLKRGDKSVYYT

SEQ ID NO: 19367 - protein, 16 aa, Severe acute respiratory syndrome coronavirus 2
  REGION 1..16: note = Table B: HLA-DRB1*01:02L
EFLKRGDKSVYYTSNP

SEQ ID NO: 19368 - protein, 16 aa, Severe acute respiratory syndrome coronavirus 2
  REGION 1..16: note = Table B: HLA-DRB1*01:02L HLA-DPA1*02:01-B1*13:01L
FLKRGDKSVYYTSNPT

SEQ ID NO: 19369 - protein, 12 aa, Severe acute respiratory syndrome coronavirus 2
  REGION 1..12: note = Table B: HLA-DRB1*01:02L HLA-DRB1*15:03L
LSLREVRTIKVF

SEQ ID NO: 19370 - protein, 12 aa, Severe acute respiratory syndrome coronavirus 2
  REGION 1..12: note = Table B: HLA-DRB1*01:02L HLA-DRB1*15:03L
SLREVRTIKVFT

SEQ ID NO: 19371 - protein, 15 aa, Severe acute respiratory syndrome coronavirus 2
  REGION 1..15: note = Table B: HLA-DRB1*01:02L
TQVVDMSMTYGQQFG

SEQ ID NO: 19372 - protein, 14 aa, Severe acute respiratory syndrome coronavirus 2
  REGION 1..14: note = Table B: HLA-DRB1*01:02L
MTYGQQFGPTYLDG

SEQ ID NO: 19373 - protein, 12 aa, Severe acute respiratory syndrome coronavirus 2
  REGION 1..12: note = Table B: HLA-DRB1*01:02L HLA-DRB1*12:01L HLA-DRB1*16:01L HLA-DRB1*04:08L HLA-DRB1*15:03L
IKPHNSHEGKTF

SEQ ID NO: 19374 - protein, 14 aa, Severe acute respiratory syndrome coronavirus 2
  REGION 1..14: note = Table B: HLA-DRB1*01:02L
VLPNDDTLRVEAFE

SEQ ID NO: 19375 - protein, 12 aa, Severe acute respiratory syndrome coronavirus 2
  REGION 1..12: note = Table B: HLA-DRB1*01:02L HLA-DRB1*08:04L HLA-DRB3*02:01L HLA-DRB1*14:01L HLA-DRB1*08:01L HLA-DQA1*05:05-B1*03:01L HLA-DRB1*04:08L
DDTLRVEAFEYY

SEQ ID NO: 19376 - protein, 12 aa, Severe acute respiratory syndrome coronavirus 2
  REGION 1..12: note = Table B: HLA-DRB1*01:02L HLA-DRB1*14:01L HLA-DRB1*11:04L HLA-DRB1*08:01L HLA-DRB1*11:01L HLA-DRB3*01:01L HLA-DPA1*01:03-B1*02:01L
DTLRVEAFEYYH

SEQ ID NO: 19377 - protein, 13 aa, Severe acute respiratory syndrome coronavirus 2
  REGION 1..13: note = Table B: HLA-DRB1*01:02L HLA-DRB1*08:01L HLA-DRB1*12:01L HLA-DPA1*01:03-B1*02:01L
TLRVEAFEYYHTT

SEQ ID NO: 19378 - protein, 12 aa, Severe acute respiratory syndrome coronavirus 2
  REGION 1..12: note = Table B: HLA-DRB1*01:02L HLA-DQA1*01:01-B1*05:01L HLA-DRB1*07:01L
YHTTDPSFLGRY

SEQ ID NO: 19379 - protein, 12 aa, Severe acute respiratory syndrome coronavirus 2
  REGION 1..12: note = Table B: HLA-DRB1*01:02L
HTTDPSFLGRYM

SEQ ID NO: 19380 - protein, 11 aa, Severe acute respiratory syndrome coronavirus 2
  REGION 1..11: note = Table B: HLA-DRB1*01:02L HLA-DRB1*04:08L
RYMSALNHTKK

SEQ ID NO: 19381 - protein, 12 aa, Severe acute respiratory syndrome coronavirus 2
  REGION 1..12: note = Table B: HLA-DRB1*01:02L
YMSALNHTKKWK

SEQ ID NO: 19382 - protein, 12 aa, Severe acute respiratory syndrome coronavirus 2
  REGION 1..12: note = Table B: HLA-DRB1*01:02L HLA-DRB1*14:01L HLA-DRB1*12:01L HLA-DRB3*01:01L HLA-DRB1*16:01L
ALNHTKKWKYPQ

SEQ ID NO: 19383 - protein, 13 aa, Severe acute respiratory syndrome coronavirus 2
  REGION 1..13: note = Table B: HLA-DRB1*01:02L HLA-DRB1*12:01L HLA-DPA1*03:01-B1*105:01L HLA-DPA1*01:02-B1*04:01L HLA-DRB1*04:08L
TKKWKYPQVNGLT

SEQ ID NO: 19384 - protein, 15 aa, Severe acute respiratory syndrome coronavirus 2
  REGION 1..15: note = Table B: HLA-DRB1*01:02L
KKWKYPQVNGLTSIK

SEQ ID NO: 19385 - protein, 13 aa, Severe acute respiratory syndrome coronavirus 2
  REGION 1..13: note = Table B: HLA-DRB1*01:02L HLA-DPA1*02:01-B1*13:01L
LTSIKWADNNCYL

SEQ ID NO: 19386 - protein, 14 aa, Severe acute respiratory syndrome coronavirus 2
  REGION 1..14: note = Table B: HLA-DRB1*01:02L HLA-DPA1*03:01-B1*105:01L HLA-DRB1*15:03L
SIKWADNNCYLATA

SEQ ID NO: 19387 - protein, 15 aa, Severe acute respiratory syndrome coronavirus 2
  REGION 1..15: note = Table B: HLA-DRB1*01:02L HLA-DPA1*01:03-B1*03:01L HLA-DQA1*05:05-B1*03:19L HLA-DPA1*01:03-B1*04:01L HLA-DRB1*12:01L HLA-DPA1*01:03-B1*02:01L HLA-DQA1*05:05-B1*03:01L HLA-DRB1*16:01L HLA-DRB1*04:08L
  REGION 1..15: note = CONT. FROM ABOVE: HLA-DQA1*02:01-B1*03:03L HLA-DRB1*15:03L
DNNCYLATALLTLQQ

SEQ ID NO: 19388 - protein, 14 aa, Severe acute respiratory syndrome coronavirus 2
  REGION 1..14: note = Table B: HLA-DRB1*01:02L HLA-DRB1*12:01L HLA-DPA1*03:01-B1*105:01L HLA-DRB1*15:03L
LLTLQQIELKFNPP

SEQ ID NO: 19389 - protein, 14 aa, Severe acute respiratory syndrome coronavirus 2
  REGION 1..14: note = Table B: HLA-DRB1*01:02L HLA-DPA1*03:01-B1*105:01L HLA-DRB1*15:03L
LTLQQIELKFNPPA

SEQ ID NO: 19390 - protein, 12 aa, Severe acute respiratory syndrome coronavirus 2
  REGION 1..12: note = Table B: HLA-DRB1*01:02L HLA-DRB3*02:01L HLA-DRB1*04:08L
LKFNPPALQDAY

SEQ ID NO: 19391 - protein, 12 aa, Severe acute respiratory syndrome coronavirus 2
  REGION 1..12: note = Table B: HLA-DRB1*01:02L HLA-DPA1*01:03-B1*03:01L
YRARAGEAANFC

SEQ ID NO: 19392 - protein, 12 aa, Severe acute respiratory syndrome coronavirus 2
  REGION 1..12: note = Table B: HLA-DRB1*01:02L HLA-DPA1*03:01-B1*105:01L
LILAYCNKTVGE

SEQ ID NO: 19393 - protein, 12 aa, Severe acute respiratory syndrome coronavirus 2
  REGION 1..12: note = Table B: HLA-DRB1*01:02L HLA-DRB1*14:01L HLA-DQA1*05:01-B1*02:01L HLA-DRB1*12:01L HLA-DRB1*16:01L HLA-DRB1*15:03L
GDVRETMSYLFQ

SEQ ID NO: 19394 - protein, 12 aa, Severe acute respiratory syndrome coronavirus 2
  REGION 1..12: note = Table B: HLA-DRB1*01:02L HLA-DRB1*12:01L HLA-DRB1*15:03L
DVRETMSYLFQH

SEQ ID NO: 19395 - protein, 13 aa, Severe acute respiratory syndrome coronavirus 2
  REGION 1..13: note = Table B: HLA-DRB1*01:02L HLA-DPA1*03:01-B1*04:02L HLA-DRB1*08:01L HLA-DRB1*12:01L HLA-DPA1*02:01-B1*13:01L HLA-DRB1*16:01L HLA-DRB1*15:03L
VRETMSYLFQHAN

SEQ ID NO: 19396 - protein, 13 aa, Severe acute respiratory syndrome coronavirus 2
  REGION 1..13: note = Table B: HLA-DRB1*01:02L HLA-DRB1*12:01L HLA-DPA1*01:03-B1*02:01L HLA-DRB1*15:03L
SYLFQHANLDSCK

SEQ ID NO: 19397 - protein, 14 aa, Severe acute respiratory syndrome coronavirus 2
  REGION 1..14: note = Table B: HLA-DRB1*01:02L
GQQQTTLKGVEAVM

SEQ ID NO: 19398 - protein, 13 aa, Severe acute respiratory syndrome coronavirus 2
  REGION 1..13: note = Table B: HLA-DRB1*01:02L
TTLKGVEAVMYMG

SEQ ID NO: 19399 - protein, 14 aa, Severe acute respiratory syndrome coronavirus 2
  REGION 1..14: note = Table B: HLA-DRB1*01:02L
TLKGVEAVMYMGTL

SEQ ID NO: 19400 - protein, 14 aa, Severe acute respiratory syndrome coronavirus 2
  REGION 1..14: note = Table B: HLA-DRB1*01:02L
FKKGVQIPCTCGKQ

SEQ ID NO: 19401 - protein, 14 aa, Severe acute respiratory syndrome coronavirus 2
  REGION 1..14: note = Table B: HLA-DRB1*01:02L HLA-DQA1*02:01-B1*03:03L
GVQIPCTCGKQATK

SEQ ID NO: 19402 - protein, 14 aa, Severe acute respiratory syndrome coronavirus 2
  REGION 1..14: note = Table B: HLA-DRB1*01:02L
KHGTFTCASEYTGN

SEQ ID NO: 19403 - protein, 14 aa, Severe acute respiratory syndrome coronavirus 2
  REGION 1..14: note = Table B: HLA-DRB1*01:02L HLA-DRB1*04:08L
YKHITSKETLYCID

SEQ ID NO: 19404 - protein, 11 aa, Severe acute respiratory syndrome coronavirus 2
  REGION 1..11: note = Table B: HLA-DRB1*01:02L
LYCIDGALLTK

SEQ ID NO: 19405 - protein, 12 aa, Severe acute respiratory syndrome coronavirus 2
  REGION 1..12: note = Table B: HLA-DRB1*01:02L HLA-DPA1*01:03-B1*03:01L HLA-DPA1*03:01-B1*04:02L HLA-DRB1*08:01L HLA-DRB1*12:01L HLA-DPA1*01:03-B1*104:01L HLA-DPA1*01:02-B1*04:01L HLA-DRB1*16:01L HLA-DRB1*15:03L
IDGALLTKSSEY

SEQ ID NO: 19406 - protein, 14 aa, Severe acute respiratory syndrome coronavirus 2
  REGION 1..14: note = Table B: HLA-DRB1*01:02L HLA-DPA1*03:01-B1*105:01L HLA-DRB1*15:03L
ALLTKSSEYKGPIT

SEQ ID NO: 19407 - protein, 14 aa, Severe acute respiratory syndrome coronavirus 2
  REGION 1..14: note = Table B: HLA-DRB1*01:02L HLA-DPA1*02:01-B1*13:01L
LLTKSSEYKGPITD

SEQ ID NO: 19408 - protein, 14 aa, Severe acute respiratory syndrome coronavirus 2
  REGION 1..14: note = Table B: HLA-DRB1*01:02L
TEIDPKLDNYYKKD

SEQ ID NO: 19409 - protein, 15 aa, Severe acute respiratory syndrome coronavirus 2
  REGION 1..15: note = Table B: HLA-DRB1*01:02L HLA-DQA1*01-B1*05L HLA-DRB1*04:08L
DPKLDNYYKKDNSYF

SEQ ID NO: 19410 - protein, 14 aa, Severe acute respiratory syndrome coronavirus 2
  REGION 1..14: note = Table B: HLA-DRB1*01:02L HLA-DRB1*14:01L HLA-DPA1*03:01-B1*105:01L HLA-DRB1*04:08L
NYYKKDNSYFTEQP

SEQ ID NO: 19411 - protein, 11 aa, Severe acute respiratory syndrome coronavirus 2
  REGION 1..11: note = Table B: HLA-DRB1*01:02L HLA-DRB1*14:02L HLA-DRB1*15:03L
DLVPNQPYPNA

SEQ ID NO: 19412 - protein, 12 aa, Severe acute respiratory syndrome coronavirus 2
  REGION 1..12: note = Table B: HLA-DRB1*01:02L HLA-DRB1*15:03L
DNFKFVCDNIKF

SEQ ID NO: 19413 - protein, 11 aa, Severe acute respiratory syndrome coronavirus 2
  REGION 1..11: note = Table B: HLA-DRB1*01:02L HLA-DRB1*04:08L
GYKKPASRELK

SEQ ID NO: 19414 - protein, 15 aa, Severe acute respiratory syndrome coronavirus 2
  REGION 1..15: note = Table B: HLA-DRB1*01:02L HLA-DPA1*02:01-B1*13:01L
KPASRELKVTFFPDL

SEQ ID NO: 19415 - protein, 14 aa, Severe acute respiratory syndrome coronavirus 2
  REGION 1..14: note = Table B: HLA-DRB1*01:02L
LNGDVVAIDYKHYT

SEQ ID NO: 19416 - protein, 14 aa, Severe acute respiratory syndrome coronavirus 2
  REGION 1..14: note = Table B: HLA-DRB1*01:02L HLA-DRB1*11:04L
PSFKKGAKLLHKPI

SEQ ID NO: 19417 - protein, 14 aa, Severe acute respiratory syndrome coronavirus 2
  REGION 1..14: note = Table B: HLA-DRB1*01:02L HLA-DRB1*08:01L
IRCLWSTKPVETSN

SEQ ID NO: 19418 - protein, 13 aa, Severe acute respiratory syndrome coronavirus 2
  REGION 1..13: note = Table B: HLA-DRB1*01:02L HLA-DQA1*01:01-B1*05:01L HLA-DRB1*04:10L HLA-DRB1*12:01L HLA-DPA1*01:03-B1*104:01L
WSTKPVETSNSFD

SEQ ID NO: 19419 - protein, 14 aa, Severe acute respiratory syndrome coronavirus 2
  REGION 1..14: note = Table B: HLA-DRB1*01:02L
STKPVETSNSFDVL

SEQ ID NO: 19420 - protein, 15 aa, Severe acute respiratory syndrome coronavirus 2
  REGION 1..15: note = Table B: HLA-DRB1*01:02L HLA-DPA1*02:01-B1*13:01L
KPVSEEVVENPTIQK

SEQ ID NO: 19421 - protein, 14 aa, Severe acute respiratory syndrome coronavirus 2
  REGION 1..14: note = Table B: HLA-DRB1*01:02L HLA-DPA1*03:01-B1*105:01L HLA-DQA1*02:01-B1*03:03L HLA-DRB1*15:03L
IQKDVLECNVKTTE

SEQ ID NO: 19422 - protein, 13 aa, Severe acute respiratory syndrome coronavirus 2
  REGION 1..13: note = Table B: HLA-DRB1*01:02L HLA-DRB1*08:04L HLA-DPA1*01:03-B1*03:01L HLA-DRB1*12:02L HLA-DRB1*15:03L
VVGDIILKPANNS

SEQ ID NO: 19423 - protein, 15 aa, Severe acute respiratory syndrome coronavirus 2
  REGION 1..15: note = Table B: HLA-DRB1*01:02L
KPANNSLKITEEVGH

SEQ ID NO: 19424 - protein, 12 aa, Severe acute respiratory syndrome coronavirus 2
  REGION 1..12: note = Table B: HLA-DRB1*01:02L
KITEEVGHTDLM

SEQ ID NO: 19425 - protein, 16 aa, Severe acute respiratory syndrome coronavirus 2
  REGION 1..16: note = Table B: HLA-DRB1*01:02L HLA-DRB1*04:08L
ITEEVGHTDLMAAYVD

SEQ ID NO: 19426 - protein, 12 aa, Severe acute respiratory syndrome coronavirus 2
  REGION 1..12: note = Table B: HLA-DRB1*01:02L
SLTIKKPNELSR

SEQ ID NO: 19427 - protein, 14 aa, Severe acute respiratory syndrome coronavirus 2
  REGION 1..14: note = Table B: HLA-DRB1*01:02L HLA-DRB1*08:01L
IKKPNELSRVLGLK

SEQ ID NO: 19428 - protein, 13 aa, Severe acute respiratory syndrome coronavirus 2
  REGION 1..13: note = Table B: HLA-DRB1*01:02L
KPNELSRVLGLKT

SEQ ID NO: 19429 - protein, 11 aa, Severe acute respiratory syndrome coronavirus 2
  REGION 1..11: note = Table B: HLA-DRB1*01:02L HLA-DQA1*05:05-B1*03:19L HLA-DPA1*01:02-B1*04:01L HLA-DRB1*04:08L
IANYAKPFLNK

SEQ ID NO: 19430 - protein, 14 aa, Severe acute respiratory syndrome coronavirus 2
  REGION 1..14: note = Table B: HLA-DRB1*01:02L
NYAKPFLNKVVSTT

SEQ ID NO: 19431 - protein, 13 aa, Severe acute respiratory syndrome coronavirus 2
  REGION 1..13: note = Table B: HLA-DRB1*01:02L
NIVTRCLNRVCTN

SEQ ID NO: 19432 - protein, 14 aa, Severe acute respiratory syndrome coronavirus 2
  REGION 1..14: note = Table B: HLA-DRB1*01:02L
TLLLQLCTFTRSTN

SEQ ID NO: 19433 - protein, 16 aa, Severe acute respiratory syndrome coronavirus 2
  REGION 1..16: note = Table B: HLA-DRB1*01:02L HLA-DPA1*03:01-B1*04:02L HLA-DPA1*01:03-B1*04:02L HLA-DRB1*12:01L HLA-DRB1*16:01L HLA-DRB1*15:03L
GKFCLEASFNYLKSPN

SEQ ID NO: 19434 - protein, 11 aa, Severe acute respiratory syndrome coronavirus 2
  REGION 1..11: note = Table B: HLA-DRB1*01:02L HLA-DRB3*02:01L HLA-DPA1*01:03-B1*03:01L HLA-DRB1*14:01L HLA-DQA1*01-B1*05L HLA-DRB1*09:01L HLA-DRB1*07:01L
LIYSTAALGVL

SEQ ID NO: 19435 - protein, 13 aa, Severe acute respiratory syndrome coronavirus 2
  REGION 1..13: note = Table B: HLA-DRB1*01:02L HLA-DPA1*01:03-B1*03:01L HLA-DPA1*01:03-B1*04:02L HLA-DRB1*16:01L HLA-DRB1*04:08L
GYREGYLNSTNVT

SEQ ID NO: 19436 - protein, 12 aa, Severe acute respiratory syndrome coronavirus 2
  REGION 1..12: note = Table B: HLA-DRB1*01:02L HLA-DRB3*02:01L HLA-DQA1*03:01-B1*03:02L
YLNSTNVTIATY

SEQ ID NO: 19437 - protein, 14 aa, Severe acute respiratory syndrome coronavirus 2
  REGION 1..14: note = Table B: HLA-DRB1*01:02L HLA-DQA1*01-B1*05L HLA-DRB1*12:01L HLA-DRB1*16:01L
AAIMQLFFSYFAVH

SEQ ID NO: 19438 - protein, 12 aa, Severe acute respiratory syndrome coronavirus 2
  REGION 1..12: note = Table B: HLA-DRB1*01:02L HLA-DRB1*15:03L
VQMAPISAMVRM

SEQ ID NO: 19439 - protein, 15 aa, Severe acute respiratory syndrome coronavirus 2
  REGION 1..15: note = Table B: HLA-DRB1*01:02L HLA-DRB1*16:01L
VRMYIFFASFYYVWK

SEQ ID NO: 19440 - protein, 13 aa, Severe acute respiratory syndrome coronavirus 2
  REGION 1..13: note = Table B: HLA-DRB1*01:02L HLA-DPA1*01:03-B1*03:01L HLA-DRB1*12:01L
SFYYVWKSYVHVV

SEQ ID NO: 19441 - protein, 14 aa, Severe acute respiratory syndrome coronavirus 2
  REGION 1..14: note = Table B: HLA-DRB1*01:02L
WKSYVHVVDGCNSS

SEQ ID NO: 19442 - protein, 13 aa, Severe acute respiratory syndrome coronavirus 2
  REGION 1..13: note = Table B: HLA-DRB1*01:02L HLA-DQA1*05:05-B1*03:19L HLA-DPA1*03:01-B1*105:01L HLA-DQA1*05:05-B1*03:01L HLA-DQA1*01:03-B1*06:01L
VHVVDGCNSSTCM

SEQ ID NO: 19443 - protein, 12 aa, Severe acute respiratory syndrome coronavirus 2
  REGION 1..12: note = Table B: HLA-DRB1*01:02L
RVECTTIVNGVR

SEQ ID NO: 19444 - protein, 12 aa, Severe acute respiratory syndrome coronavirus 2
  REGION 1..12: note = Table B: HLA-DRB1*01:02L HLA-DRB1*04:08L
VECTTIVNGVRR

SEQ ID NO: 19445 - protein, 14 aa, Severe acute respiratory syndrome coronavirus 2
  REGION 1..14: note = Table B: HLA-DRB1*01:02L HLA-DQA1*01:03-B1*06:01L
ANGGKGFCKLHNWN

SEQ ID NO: 19446 - protein, 14 aa, Severe acute respiratory syndrome coronavirus 2
  REGION 1..14: note = Table B: HLA-DRB1*01:02L HLA-DRB1*04:08L
VTVKNGSIHLYFDK

SEQ ID NO: 19447 - protein, 12 aa, Severe acute respiratory syndrome coronavirus 2
  REGION 1..12: note = Table B: HLA-DRB1*01:02L HLA-DRB1*08:01L HLA-DRB1*04:08L
YFDKAGQKTYER

SEQ ID NO: 19448 - protein, 14 aa, Severe acute respiratory syndrome coronavirus 2
  REGION 1..14: note = Table B: HLA-DRB1*01:02L HLA-DRB1*08:01L
DKAGQKTYERHSLS

SEQ ID NO: 19449 - protein, 13 aa, Severe acute respiratory syndrome coronavirus 2
  REGION 1..13: note = Table B: HLA-DRB1*01:02L
GQKTYERHSLSHF

SEQ ID NO: 19450 - protein, 12 aa, Severe acute respiratory syndrome coronavirus 2
  REGION 1..12: note = Table B: HLA-DRB1*01:02L HLA-DRB1*08:01L HLA-DRB1*12:01L HLA-DRB1*15:03L
TYERHSLSHFVN

SEQ ID NO: 19451 - protein, 13 aa, Severe acute respiratory syndrome coronavirus 2
  REGION 1..13: note = Table B: HLA-DRB1*01:02L HLA-DRB1*16:01L HLA-DRB1*15:03L
HSLSHFVNLDNLR

SEQ ID NO: 19452 - protein, 15 aa, Severe acute respiratory syndrome coronavirus 2
  REGION 1..15: note = Table B: HLA-DRB1*01:02L
TKGSLPINVIVFDGK

SEQ ID NO: 19453 - protein, 14 aa, Severe acute respiratory syndrome coronavirus 2
  REGION 1..14: note = Table B: HLA-DRB1*01:02L HLA-DPA1*02:01-B1*13:01L HLA-DQA1*03:01-B1*03:02L HLA-DQA1*02:01-B1*03:03L
DGKSKCEESSAKSA

SEQ ID NO: 19454 - protein, 14 aa, Severe acute respiratory syndrome coronavirus 2
  REGION 1..14: note = Table B: HLA-DRB1*01:02L
EESSAKSASVYYSQ

SEQ ID NO: 19455 - protein, 13 aa, Severe acute respiratory syndrome coronavirus 2
  REGION 1..13: note = Table B: HLA-DRB1*01:02L
SSAKSASVYYSQL

SEQ ID NO: 19456 - protein, 14 aa, Severe acute respiratory syndrome coronavirus 2
  REGION 1..14: note = Table B: HLA-DRB1*01:02L HLA-DPA1*01:03-B1*03:01L HLA-DPA1*01:03-B1*04:02L HLA-DRB1*12:01L HLA-DPA1*01:03-B1*02:01L HLA-DQA1*05:05-B1*03:01L HLA-DRB1*15:03L
YSQLMCQPILLLDQ

SEQ ID NO: 19457 - protein, 13 aa, Severe acute respiratory syndrome coronavirus 2
  REGION 1..13: note = Table B: HLA-DRB1*01:02L HLA-DRB3*02:01L
DSAEVAVKMFDAY

SEQ ID NO: 19458 - protein, 12 aa, Severe acute respiratory syndrome coronavirus 2
  REGION 1..12: note = Table B: HLA-DRB1*01:02L HLA-DPA1*01:03-B1*03:01L
ATAEAELAKNVS

SEQ ID NO: 19459 - protein, 13 aa, Severe acute respiratory syndrome coronavirus 2
  REGION 1..13: note = Table B: HLA-DRB1*01:02L HLA-DPA1*02:01-B1*13:01L HLA-DRB1*07:01L HLA-DRB1*04:08L HLA-DRB1*08:03L
AEAELAKNVSLDN

SEQ ID NO: 19460 - protein, 12 aa, Severe acute respiratory syndrome coronavirus 2
  REGION 1..12: note = Table B: HLA-DRB1*01:02L HLA-DPA1*01:03-B1*03:01L HLA-DQA1*01:01-B1*05:01L HLA-DRB1*12:01L HLA-DRB1*16:01L HLA-DRB1*04:08L
ISAARQGFVDSD

SEQ ID NO: 19461 - protein, 13 aa, Severe acute respiratory syndrome coronavirus 2
  REGION 1..13: note = Table B: HLA-DRB1*01:02L HLA-DPA1*02:01-B1*13:01L
RQGFVDSDVETKD

SEQ ID NO: 19462 - protein, 14 aa, Severe acute respiratory syndrome coronavirus 2
  REGION 1..14: note = Table B: HLA-DRB1*01:02L HLA-DRB1*08:04L HLA-DRB1*04:08L
QGFVDSDVETKDVV

SEQ ID NO: 19463 - protein, 14 aa, Severe acute respiratory syndrome coronavirus 2
  REGION 1..14: note = Table B: HLA-DRB1*01:02L HLA-DRB1*08:01L HLA-DPA1*03:01-B1*105:01L HLA-DQA1*02:01-B1*03:03L HLA-DRB1*15:03L
VVECLKLSHQSDIE

SEQ ID NO: 19464 - protein, 14 aa, Severe acute respiratory syndrome coronavirus 2
  REGION 1..14: note = Table B: HLA-DRB1*01:02L HLA-DPA1*01:03-B1*03:01L HLA-DRB1*12:01L HLA-DRB1*04:08L HLA-DRB1*15:03L
KLSHQSDIEVTGDS

SEQ ID NO: 19465 - protein, 14 aa, Severe acute respiratory syndrome coronavirus 2
  REGION 1..14: note = Table B: HLA-DRB1*01:02L HLA-DPA1*02:01-B1*13:01L
SDIEVTGDSCNNYM

SEQ ID NO: 19466 - protein, 14 aa, Severe acute respiratory syndrome coronavirus 2
  REGION 1..14: note = Table B: HLA-DRB1*01:02L
DLGACIDCSARHIN

SEQ ID NO: 19467 - protein, 12 aa, Severe acute respiratory syndrome coronavirus 2
  REGION 1..12: note = Table B: HLA-DRB1*01:02L
ARHINAQVAKSH

SEQ ID NO: 19468 - protein, 13 aa, Severe acute respiratory syndrome coronavirus 2
  REGION 1..13: note = Table B: HLA-DRB1*01:02L HLA-DRB1*08:04L
NIALIWNVKDFMS

SEQ ID NO: 19469 - protein, 13 aa, Severe acute respiratory syndrome coronavirus 2
  REGION 1..13: note = Table B: HLA-DRB1*01:02L HLA-DRB1*08:04L
IALIWNVKDFMSL

SEQ ID NO: 19470 - protein, 12 aa, Severe acute respiratory syndrome coronavirus 2
  REGION 1..12: note = Table B: HLA-DRB1*01:02L HLA-DRB1*08:01L HLA-DPA1*01:03-B1*02:01L
IWNVKDFMSLSE

SEQ ID NO: 19471 - protein, 11 aa, Severe acute respiratory syndrome coronavirus 2
  REGION 1..11: note = Table B: HLA-DRB1*01:02L HLA-DRB1*16:01L HLA-DRB1*15:03L
FMSLSEQLRKQ

SEQ ID NO: 19472 - protein, 12 aa, Severe acute respiratory syndrome coronavirus 2
  REGION 1..12: note = Table B: HLA-DRB1*01:02L HLA-DRB1*11:04L HLA-DRB1*08:01L HLA-DRB1*11:01L HLA-DRB1*16:01L
QLRKQIRSAAKK

SEQ ID NO: 19473 - protein, 12 aa, Severe acute respiratory syndrome coronavirus 2
  REGION 1..12: note = Table B: HLA-DRB1*01:02L
LRKQIRSAAKKN

SEQ ID NO: 19474 - protein, 14 aa, Severe acute respiratory syndrome coronavirus 2
  REGION 1..14: note = Table B: HLA-DRB1*01:02L
KNNLPFKLTCATTR

SEQ ID NO: 19475 - protein, 12 aa, Severe acute respiratory syndrome coronavirus 2
  REGION 1..12: note = Table B: HLA-DRB1*01:02L HLA-DRB1*04:08L
KLTCATTRQVVN

SEQ ID NO: 19476 - protein, 12 aa, Severe acute respiratory syndrome coronavirus 2
  REGION 1..12: note = Table B: HLA-DRB1*01:02L HLA-DRB1*04:08L
HTDFSSEIIGYK

SEQ ID NO: 19477 - protein, 14 aa, Severe acute respiratory syndrome coronavirus 2
  REGION 1..14: note = Table B: HLA-DRB1*01:02L HLA-DRB1*08:04L HLA-DRB1*14:02L HLA-DPA1*01:03-B1*104:01L HLA-DRB1*15:03L
IDGGVTRDIASTDT

SEQ ID NO: 19478 - protein, 14 aa, Severe acute respiratory syndrome coronavirus 2
  REGION 1..14: note = Table B: HLA-DRB1*01:02L HLA-DQA1*05:05-B1*03:01L
IASTDTCFANKHAD

SEQ ID NO: 19479 - protein, 15 aa, Severe acute respiratory syndrome coronavirus 2
  REGION 1..15: note = Table B: HLA-DRB1*01:02L HLA-DPA1*02:01-B1*13:01L HLA-DRB1*16:01L HLA-DRB1*15:03L
ANKHADFDTWFSQRG

SEQ ID NO: 19480 - protein, 14 aa, Severe acute respiratory syndrome coronavirus 2
  REGION 1..14: note = Table B: HLA-DRB1*01:02L
KHADFDTWFSQRGG

SEQ ID NO: 19481 - protein, 14 aa, Severe acute respiratory syndrome coronavirus 2
  REGION 1..14: note = Table B: HLA-DRB1*01:02L HLA-DRB1*04:08L
TWFSQRGGSYTNDK

SEQ ID NO: 19482 - protein, 14 aa, Severe acute respiratory syndrome coronavirus 2
  REGION 1..14: note = Table B: HLA-DRB1*01:02L HLA-DQA1*05:05-B1*03:19L
WFSQRGGSYTNDKA

SEQ ID NO: 19483 - protein, 14 aa, Severe acute respiratory syndrome coronavirus 2
  REGION 1..14: note = Table B: HLA-DRB1*01:02L
DKACPLIAAVITRE

SEQ ID NO: 19484 - protein, 13 aa, Severe acute respiratory syndrome coronavirus 2
  REGION 1..13: note = Table B: HLA-DRB1*01:02L
PGTILRTTNGDFL

SEQ ID NO: 19485 - protein, 14 aa, Severe acute respiratory syndrome coronavirus 2
  REGION 1..14: note = Table B: HLA-DRB1*01:02L
LRTTNGDFLHFLPR

SEQ ID NO: 19486 - protein, 14 aa, Severe acute respiratory syndrome coronavirus 2
  REGION 1..14: note = Table B: HLA-DRB1*01:02L HLA-DRB1*16:01L HLA-DRB1*15:03L
PRVFSAVGNICYTP

SEQ ID NO: 19487 - protein, 14 aa, Severe acute respiratory syndrome coronavirus 2
  REGION 1..14: note = Table B: HLA-DRB1*01:02L HLA-DRB1*04:08L HLA-DRB1*15:03L
RVFSAVGNICYTPS

SEQ ID NO: 19488 - protein, 12 aa, Severe acute respiratory syndrome coronavirus 2
  REGION 1..12: note = Table B: HLA-DRB1*01:02L
NICYTPSKLIEY

SEQ ID NO: 19489 - protein, 14 aa, Severe acute respiratory syndrome coronavirus 2
  REGION 1..14: note = Table B: HLA-DRB1*01:02L HLA-DPA1*01:03-B1*03:01L HLA-DQA1*05:01-B1*02:01L HLA-DPA1*01:03-B1*04:02L HLA-DQA1*03:01-B1*03:02L HLA-DRB1*04:08L HLA-DRB1*15:03L
YTDFATSACVLAAE

SEQ ID NO: 19490 - protein, 14 aa, Severe acute respiratory syndrome coronavirus 2
  REGION 1..14: note = Table B: HLA-DRB1*01:02L HLA-DRB1*16:01L HLA-DRB1*04:08L HLA-DRB1*15:03L
AAECTIFKDASGKP

SEQ ID NO: 19491 - protein, 13 aa, Severe acute respiratory syndrome coronavirus 2
  REGION 1..13: note = Table B: HLA-DRB1*01:02L HLA-DPA1*01:03-B1*03:01L HLA-DPA1*03:01-B1*04:02L
LEGSVAYESLRPD

SEQ ID NO: 19492 - protein, 12 aa, Severe acute respiratory syndrome coronavirus 2
  REGION 1..12: note = Table B: HLA-DRB1*01:02L
AYESLRPDTRYV

SEQ ID NO: 19493 - protein, 13 aa, Severe acute respiratory syndrome coronavirus 2
  REGION 1..13: note = Table B: HLA-DRB1*01:02L HLA-DPA1*02:01-B1*13:01L
IQFPNTYLEGSVR

SEQ ID NO: 19494 - protein, 12 aa, Severe acute respiratory syndrome coronavirus 2
  REGION 1..12: note = Table B: HLA-DRB1*01:02L
RVVTTFDSEYCR

SEQ ID NO: 19495 - protein, 14 aa, Severe acute respiratory syndrome coronavirus 2
  REGION 1..14: note = Table B: HLA-DRB1*01:02L HLA-DRB1*04:08L
DSEYCRHGTCERSE

SEQ ID NO: 19496 - protein, 15 aa, Severe acute respiratory syndrome coronavirus 2
  REGION 1..15: note = Table B: HLA-DRB1*01:02L HLA-DQA1*02:01-B1*03:03L
SEYCRHGTCERSEAG

SEQ ID NO: 19497 - protein, 12 aa, Severe acute respiratory syndrome coronavirus 2
  REGION 1..12: note = Table B: HLA-DRB1*01:02L HLA-DRB1*14:01L
GRWVLNNDYYRS

SEQ ID NO: 19498 - protein, 10 aa, Severe acute respiratory syndrome coronavirus 2
  REGION 1..10: note = Table B: HLA-DRB1*01:02L HLA-DRB1*16:01L
YRSLPGVFCG

SEQ ID NO: 19499 - protein, 14 aa, Severe acute respiratory syndrome coronavirus 2
  REGION 1..14: note = Table B: HLA-DRB1*01:02L HLA-DRB1*08:04L HLA-DRB1*11:01L HLA-DRB1*04:08L
YYFMRFRRAFGEYS

SEQ ID NO: 19500 - protein, 12 aa, Severe acute respiratory syndrome coronavirus 2
  REGION 1..12: note = Table B: HLA-DRB1*01:02L HLA-DRB1*08:01L HLA-DRB1*16:01L HLA-DRB1*04:08L
MRFRRAFGEYSH

SEQ ID NO: 19501 - protein, 12 aa, Severe acute respiratory syndrome coronavirus 2
  REGION 1..12: note = Table B: HLA-DRB1*01:02L
RFRRAFGEYSHV

SEQ ID NO: 19502 - protein, 11 aa, Severe acute respiratory syndrome coronavirus 2
  REGION 1..11: note = Table B: HLA-DRB1*01:02L HLA-DRB1*16:01L
SHVVAFNTLLF

SEQ ID NO: 19503 - protein, 14 aa, Severe acute respiratory syndrome coronavirus 2
  REGION 1..14: note = Table B: HLA-DRB1*01:02L HLA-DPA1*01:03-B1*04:02L HLA-DRB1*16:01L HLA-DRB1*04:08L
HIQWMVMFTPLVPF

SEQ ID NO: 19504 - protein, 10 aa, Severe acute respiratory syndrome coronavirus 2
  REGION 1..10: note = Table B: HLA-DRB1*01:02L HLA-DRB1*15:03L
FTPLVPFWIT

SEQ ID NO: 19505 - protein, 12 aa, Severe acute respiratory syndrome coronavirus 2
  REGION 1..12: note = Table B: HLA-DRB1*01:02L
TIAYIICISTKH

SEQ ID NO: 19506 - protein, 12 aa, Severe acute respiratory syndrome coronavirus 2
  REGION 1..12: note = Table B: HLA-DRB1*01:02L HLA-DPA1*03:01-B1*04:02L
AYIICISTKHFY

SEQ ID NO: 19507 - protein, 11 aa, Severe acute respiratory syndrome coronavirus 2
  REGION 1..11: note = Table B: HLA-DRB1*01:02L HLA-DRB1*04:08L
FYWFFSNYLKR

SEQ ID NO: 19508 - protein, 14 aa, Severe acute respiratory syndrome coronavirus 2
  REGION 1..14: note = Table B: HLA-DRB1*01:02L HLA-DRB1*12:01L HLA-DPA1*02:01-B1*13:01L
YLKRRVVFNGVSFS

SEQ ID NO: 19509 - protein, 14 aa, Severe acute respiratory syndrome coronavirus 2
  REGION 1..14: note = Table B: HLA-DRB1*01:02L HLA-DPA1*01:03-B1*03:01L HLA-DPA1*03:01-B1*04:02L HLA-DRB1*15:03L
FEEAALCTFLLNKE

SEQ ID NO: 19510 - protein, 14 aa, Severe acute respiratory syndrome coronavirus 2
  REGION 1..14: note = Table B: HLA-DRB1*01:02L
KEMYLKLRSDVLLP

SEQ ID NO: 19511 - protein, 14 aa, Severe acute respiratory syndrome coronavirus 2
  REGION 1..14: note = Table B: HLA-DRB1*01:02L
EMYLKLRSDVLLPL

SEQ ID NO: 19512 - protein, 12 aa, Severe acute respiratory syndrome coronavirus 2
  REGION 1..12: note = Table B: HLA-DRB1*01:02L
LLPLTQYNRYLA

SEQ ID NO: 19513 - protein, 12 aa, Severe acute respiratory syndrome coronavirus 2
  REGION 1..12: note = Table B: HLA-DRB1*01:02L HLA-DRB1*04:08L
TQYNRYLALYNK

SEQ ID NO: 19514 - protein, 12 aa, Severe acute respiratory syndrome coronavirus 2
  REGION 1..12: note = Table B: HLA-DRB1*01:02L HLA-DPA1*03:01-B1*04:02L HLA-DPA1*03:01-B1*105:01L HLA-DPA1*01:02-B1*04:01L HLA-DRB1*15:03L
QYNRYLALYNKY

SEQ ID NO: 19515 - protein, 11 aa, Severe acute respiratory syndrome coronavirus 2
  REGION 1..11: note = Table B: HLA-DRB1*01:02L HLA-DRB1*08:01L HLA-DRB1*12:01L HLA-DRB1*04:08L
NRYLALYNKYK

SEQ ID NO: 19516 - protein, 11 aa, Severe acute respiratory syndrome coronavirus 2
  REGION 1..11: note = Table B: HLA-DRB1*01:02L
YLALYNKYKYF

SEQ ID NO: 19517 - protein, 15 aa, Severe acute respiratory syndrome coronavirus 2
  REGION 1..15: note = Table B: HLA-DRB1*01:02L
YREAACCHLAKALND

SEQ ID NO: 19518 - protein, 16 aa, Severe acute respiratory syndrome coronavirus 2
  REGION 1..16: note = Table B: HLA-DRB1*01:02L
LNDFSNSGSDVLYQPP

SEQ ID NO: 19519 - protein, 15 aa, Severe acute respiratory syndrome coronavirus 2
  REGION 1..15: note = Table B: HLA-DRB1*01:02L HLA-DRB1*08:04L HLA-DRB1*11:04L HLA-DRB1*08:01L HLA-DRB1*11:01L HLA-DRB3*01:01L
SAVLQSGFRKMAFPS

SEQ ID NO: 19520 - protein, 15 aa, Severe acute respiratory syndrome coronavirus 2
  REGION 1..15: note = Table B: HLA-DRB1*01:02L
AVLQSGFRKMAFPSG

SEQ ID NO: 19521 - protein, 12 aa, Severe acute respiratory syndrome coronavirus 2
  REGION 1..12: note = Table B: HLA-DRB1*01:02L HLA-DRB1*12:01L HLA-DRB1*15:03L
LIRKSNHNFLVQ

SEQ ID NO: 19522 - protein, 13 aa, Severe acute respiratory syndrome coronavirus 2
  REGION 1..13: note = Table B: HLA-DRB1*01:02L HLA-DRB1*12:01L HLA-DRB1*15:03L
AGNVQLRVIGHSM

SEQ ID NO: 19523 - protein, 17 aa, Severe acute respiratory syndrome coronavirus 2
  REGION 1..17: note = Table B: HLA-DRB1*01:02L
IQPGQTFSVLACYNGSP

SEQ ID NO: 19524 - protein, 14 aa, Severe acute respiratory syndrome coronavirus 2
  REGION 1..14: note = Table B: HLA-DRB1*01:02L HLA-DRB1*15:03L
SVLACYNGSPSGVY

SEQ ID NO: 19525 - protein, 14 aa, Severe acute respiratory syndrome coronavirus 2
  REGION 1..14: note = Table B: HLA-DRB1*01:02L HLA-DPA1*01:03-B1*03:01L HLA-DRB1*15:03L
VLACYNGSPSGVYQ

SEQ ID NO: 19526 - protein, 13 aa, Severe acute respiratory syndrome coronavirus 2
  REGION 1..13: note = Table B: HLA-DRB1*01:02L HLA-DRB1*08:01L HLA-DRB1*11:01L HLA-DRB1*12:01L HLA-DQA1*01:03-B1*06:01L HLA-DQA1*02:01-B1*03:03L HLA-DRB1*15:03L
IDYDCVSFCYMHH

SEQ ID NO: 19527 - protein, 13 aa, Severe acute respiratory syndrome coronavirus 2
  REGION 1..13: note = Table B: HLA-DRB1*01:02L HLA-DRB1*14:01L HLA-DRB1*04:08L
GVHAGTDLEGNFY

SEQ ID NO: 19528 - protein, 13 aa, Severe acute respiratory syndrome coronavirus 2
  REGION 1..13: note = Table B: HLA-DRB1*01:02L HLA-DPA1*03:01-B1*04:02L HLA-DQA1*01:01-B1*05:01L
EGNFYGPFVDRQT

SEQ ID NO: 19529 - protein, 12 aa, Severe acute respiratory syndrome coronavirus 2
  REGION 1..12: note = Table B: HLA-DRB1*01:02L HLA-DRB1*04:10L HLA-DRB1*04:08L HLA-DRB1*15:03L
YGPFVDRQTAQA

SEQ ID NO: 19530 - protein, 13 aa, Severe acute respiratory syndrome coronavirus 2
  REGION 1..13: note = Table B: HLA-DRB1*01:02L
NVLAWLYAAVING

SEQ ID NO: 19531 - protein, 12 aa, Severe acute respiratory syndrome coronavirus 2
  REGION 1..12: note = Table B: HLA-DRB1*01:02L HLA-DPA1*01:03-B1*03:01L HLA-DRB1*08:01L HLA-DRB1*04:10L HLA-DRB1*12:01L HLA-DRB1*10:01L HLA-DRB1*15:03L
AWLYAAVINGDR

SEQ ID NO: 19532 - protein, 11 aa, Severe acute respiratory syndrome coronavirus 2
  REGION 1..11: note = Table B: HLA-DRB1*01:02L
LYAAVINGDRW

SEQ ID NO: 19533 - protein, 13 aa, Severe acute respiratory syndrome coronavirus 2
  REGION 1..13: note = Table B: HLA-DRB1*01:02L HLA-DRB1*08:04L HLA-DRB1*11:01L HLA-DPA1*01:03-B1*02:01L
DRWFLNRFTTTLN

SEQ ID NO: 19534 - protein, 14 aa, Severe acute respiratory syndrome coronavirus 2
  REGION 1..14: note = Table B: HLA-DRB1*01:02L HLA-DPA1*02:01-B1*13:01L
FNLVAMKYNYEPLT

SEQ ID NO: 19535 - protein, 13 aa, Severe acute respiratory syndrome coronavirus 2
  REGION 1..13: note = Table B: HLA-DRB1*01:02L
PLSAQTGIAVLDM

SEQ ID NO: 19536 - protein, 13 aa, Severe acute respiratory syndrome coronavirus 2
  REGION 1..13: note = Table B: HLA-DRB1*01:02L HLA-DRB1*12:01L HLA-DQA1*05:05-B1*03:01L HLA-DRB1*04:08L HLA-DQA1*02:01-B1*03:03L
TGIAVLDMCASLK

SEQ ID NO: 19537 - protein, 15 aa, Severe acute respiratory syndrome coronavirus 2
  REGION 1..15: note = Table B: HLA-DRB1*01:02L
KELLQNGMNGRTILG

SEQ ID NO: 19538 - protein, 14 aa, Severe acute respiratory syndrome coronavirus 2
  REGION 1..14: note = Table B: HLA-DRB1*01:02L HLA-DRB1*08:04L
ALLEDEFTPFDVVR

SEQ ID NO: 19539 - protein, 12 aa, Severe acute respiratory syndrome coronavirus 2
  REGION 1..12: note = Table B: HLA-DRB1*01:02L HLA-DRB1*14:17L HLA-DRB1*15:03L
SGVTFQSAVKRT

SEQ ID NO: 19540 - protein, 12 aa, Severe acute respiratory syndrome coronavirus 2
  REGION 1..12: note = Table B: HLA-DRB1*01:02L HLA-DRB1*14:01L HLA-DRB1*08:01L HLA-DRB1*16:01L HLA-DRB1*04:08L
SAVKRTIKGTHH

SEQ ID NO: 19541 - protein, 12 aa, Severe acute respiratory syndrome coronavirus 2
  REGION 1..12: note = Table B: HLA-DRB1*01:02L HLA-DRB1*16:01L
AVKRTIKGTHHW

SEQ ID NO: 19542 - protein, 14 aa, Severe acute respiratory syndrome coronavirus 2
  REGION 1..14: note = Table B: HLA-DRB1*01:02L
KRTIKGTHHWLLLT

SEQ ID NO: 19543 - protein, 14 aa, Severe acute respiratory syndrome coronavirus 2
  REGION 1..14: note = Table B: HLA-DRB1*01:02L HLA-DPA1*01:03-B1*03:01L HLA-DPA1*01:03-B1*04:02L HLA-DPA1*01:03-B1*104:01L
LPFAMGIIAMSAFA

SEQ ID NO: 19544 - protein, 11 aa, Severe acute respiratory syndrome coronavirus 2
  REGION 1..11: note = Table B: HLA-DRB1*01:02L HLA-DRB1*08:01L HLA-DRB1*04:08L
FAMMFVKHKHA

SEQ ID NO: 19545 - protein, 12 aa, Severe acute respiratory syndrome coronavirus 2
  REGION 1..12: note = Table B: HLA-DRB1*01:02L
LFLLPSLATVAY

SEQ ID NO: 19546 - protein, 17 aa, Severe acute respiratory syndrome coronavirus 2
  REGION 1..17: note = Table B: HLA-DRB1*01:02L
LPSLATVAYFNMVYMPA

SEQ ID NO: 19547 - protein, 14 aa, Severe acute respiratory syndrome coronavirus 2
  REGION 1..14: note = Table B: HLA-DRB1*01:02L HLA-DRB1*08:04L HLA-DPA1*01:03-B1*03:01L HLA-DRB1*12:01L HLA-DPA1*02:01-B1*13:01L HLA-DQA1*05:05-B1*03:01L HLA-DRB1*16:01L HLA-DRB1*04:08L
VAYFNMVYMPASWV

SEQ ID NO: 19548 - protein, 13 aa, Severe acute respiratory syndrome coronavirus 2
  REGION 1..13: note = Table B: HLA-DRB1*01:02L
DMVDTSLSGFKLK

SEQ ID NO: 19549 - protein, 14 aa, Severe acute respiratory syndrome coronavirus 2
  REGION 1..14: note = Table B: HLA-DRB1*01:02L HLA-DRB1*15:03L
SGFKLKDCVMYASA

SEQ ID NO: 19550 - protein, 13 aa, Severe acute respiratory syndrome coronavirus 2
  REGION 1..13: note = Table B: HLA-DRB1*01:02L HLA-DRB1*14:01L
VVLLILMTARTVY

SEQ ID NO: 19551 - protein, 13 aa, Severe acute respiratory syndrome coronavirus 2
  REGION 1..13: note = Table B: HLA-DRB1*01:02L
LMTARTVYDDGAR

SEQ ID NO: 19552 - protein, 13 aa, Severe acute respiratory syndrome coronavirus 2
  REGION 1..13: note = Table B: HLA-DRB1*01:02L HLA-DPA1*01:03-B1*03:01L HLA-DRB1*16:01L
ARRVWTLMNVLTL

SEQ ID NO: 19553 - protein, 12 aa, Severe acute respiratory syndrome coronavirus 2
  REGION 1..12: note = Table B: HLA-DRB1*01:02L
WTLMNVLTLVYK

SEQ ID NO: 19554 - protein, 13 aa, Severe acute respiratory syndrome coronavirus 2
  REGION 1..13: note = Table B: HLA-DRB1*01:02L HLA-DRB1*04:08L
NVLTLVYKVYYGN

SEQ ID NO: 19555 - protein, 13 aa, Severe acute respiratory syndrome coronavirus 2
  REGION 1..13: note = Table B: HLA-DRB1*01:02L HLA-DRB1*08:04L HLA-DPA1*01:03-B1*03:01L HLA-DRB1*08:01L HLA-DQA1*05:01-B1*02:01L HLA-DPA1*01:03-B1*04:02L HLA-DRB1*16:01L
VVTTVMFLARGIV

SEQ ID NO: 19556 - protein, 10 aa, Severe acute respiratory syndrome coronavirus 2
  REGION 1..10: note = Table B: HLA-DRB1*01:02L HLA-DRB1*12:01L HLA-DRB1*15:03L
IFFITGNTLQ

SEQ ID NO: 19557 - protein, 14 aa, Severe acute respiratory syndrome coronavirus 2
  REGION 1..14: note = Table B: HLA-DRB1*01:02L
FGLFCLLNRYFRLT

SEQ ID NO: 19558 - protein, 13 aa, Severe acute respiratory syndrome coronavirus 2
  REGION 1..13: note = Table B: HLA-DRB1*01:02L HLA-DRB1*04:08L
NRYFRLTLGVYDY

SEQ ID NO: 19559 - protein, 13 aa, Severe acute respiratory syndrome coronavirus 2
  REGION 1..13: note = Table B: HLA-DRB1*01:02L
LGVYDYLVSTQEF

SEQ ID NO: 19560 - protein, 12 aa, Severe acute respiratory syndrome coronavirus 2
  REGION 1..12: note = Table B: HLA-DRB1*01:02L HLA-DRB3*02:01L
YDYLVSTQEFRY

SEQ ID NO: 19561 - protein, 11 aa, Severe acute respiratory syndrome coronavirus 2
  REGION 1..11: note = Table B: HLA-DRB1*01:02L HLA-DRB3*02:01L
YLVSTQEFRYM

SEQ ID NO: 19562 - protein, 12 aa, Severe acute respiratory syndrome coronavirus 2
  REGION 1..12: note = Table B: HLA-DRB1*01:02L
QEFRYMNSQGLL

SEQ ID NO: 19563 - protein, 12 aa, Severe acute respiratory syndrome coronavirus 2
  REGION 1..12: note = Table B: HLA-DRB1*01:02L
EFRYMNSQGLLP

SEQ ID NO: 19564 - protein, 14 aa, Severe acute respiratory syndrome coronavirus 2
  REGION 1..14: note = Table B: HLA-DRB1*01:02L HLA-DPA1*03:01-B1*105:01L
MNSQGLLPPKNSID

SEQ ID NO: 19565 - protein, 14 aa, Severe acute respiratory syndrome coronavirus 2
  REGION 1..14: note = Table B: HLA-DRB1*01:02L
QGLLPPKNSIDAFK

SEQ ID NO: 19566 - protein, 15 aa, Severe acute respiratory syndrome coronavirus 2
  REGION 1..15: note = Table B: HLA-DRB1*01:02L
VQSKMSDVKCTSVVL

SEQ ID NO: 19567 - protein, 12 aa, Severe acute respiratory syndrome coronavirus 2
  REGION 1..12: note = Table B: HLA-DRB1*01:02L
QLRVESSSKLWA

SEQ ID NO: 19568 - protein, 14 aa, Severe acute respiratory syndrome coronavirus 2
  REGION 1..14: note = Table B: HLA-DRB1*01:02L HLA-DRB1*15:03L
AQCVQLHNDILLAK

SEQ ID NO: 19569 - protein, 12 aa, Severe acute respiratory syndrome coronavirus 2
  REGION 1..12: note = Table B: HLA-DRB1*01:02L HLA-DRB1*15:03L
VQLHNDILLAKD

SEQ ID NO: 19570 - protein, 11 aa, Severe acute respiratory syndrome coronavirus 2
  REGION 1..11: note = Table B: HLA-DRB1*01:02L HLA-DPA1*01:03-B1*03:01L HLA-DPA1*02:01-B1*13:01L
TTEAFEKMVSL

SEQ ID NO: 19571 - protein, 14 aa, Severe acute respiratory syndrome coronavirus 2
  REGION 1..14: note = Table B: HLA-DRB1*01:02L
GAVDINKLCEEMLD

SEQ ID NO: 19572 - protein, 13 aa, Severe acute respiratory syndrome coronavirus 2
  REGION 1..13: note = Table B: HLA-DRB1*01:02L HLA-DQA1*05:05-B1*03:01L
NRATLQAIASEFS

SEQ ID NO: 19573 - protein, 14 aa, Severe acute respiratory syndrome coronavirus 2
  REGION 1..14: note = Table B: HLA-DRB1*01:02L
ATLQAIASEFSSLP

SEQ ID NO: 19574 - protein, 15 aa, Severe acute respiratory syndrome coronavirus 2
  REGION 1..15: note = Table B: HLA-DRB1*01:02L HLA-DRB1*04:08L
LQAIASEFSSLPSYA

SEQ ID NO: 19575 - protein, 12 aa, Severe acute respiratory syndrome coronavirus 2
  REGION 1..12: note = Table B: HLA-DRB1*01:02L HLA-DRB4*03:01NL HLA-DQA1*01:01-B1*05:01L HLA-DRB1*08:01L HLA-DQA1*01-B1*05L HLA-DQA1*05:05-B1*03:116L HLA-DRB1*04:10L HLA-DRB1*12:01L HLA-DRB1*12:02L HLA-DRB1*14:54L HLA-DRB1*10:01L HLA-DRB1*04:08L
  REGION 1..12: note = CONT. FROM ABOVE: HLA-DRB1*08:03L
AAFATAQEAYEQ

SEQ ID NO: 19576 - protein, 12 aa, Severe acute respiratory syndrome coronavirus 2
  REGION 1..12: note = Table B: HLA-DRB1*01:02L HLA-DRB1*04:10L HLA-DPA1*02:01-B1*13:01L HLA-DRB1*07:01L HLA-DRB1*04:08L
AVANGDSEVVLK

SEQ ID NO: 19577 - protein, 12 aa, Severe acute respiratory syndrome coronavirus 2
  REGION 1..12: note = Table B: HLA-DRB1*01:02L HLA-DRB1*04:08L
VANGDSEVVLKK

SEQ ID NO: 19578 - protein, 15 aa, Severe acute respiratory syndrome coronavirus 2
  REGION 1..15: note = Table B: HLA-DRB1*01:02L
DRDAAMQRKLEKMAD

SEQ ID NO: 19579 - protein, 14 aa, Severe acute respiratory syndrome coronavirus 2
  REGION 1..14: note = Table B: HLA-DRB1*01:02L
LEKMADQAMTQMYK

SEQ ID NO: 19580 - protein, 14 aa, Severe acute respiratory syndrome coronavirus 2
  REGION 1..14: note = Table B: HLA-DRB1*01:02L
MADQAMTQMYKQAR

SEQ ID NO: 19581 - protein, 13 aa, Severe acute respiratory syndrome coronavirus 2
  REGION 1..13: note = Table B: HLA-DRB1*01:02L HLA-DRB1*16:01L HLA-DRB1*15:03L
QAMTQMYKQARSE

SEQ ID NO: 19582 - protein, 11 aa, Severe acute respiratory syndrome coronavirus 2
  REGION 1..11: note = Table B: HLA-DRB1*01:02L HLA-DRB1*16:01L
MYKQARSEDKR

SEQ ID NO: 19583 - protein, 12 aa, Severe acute respiratory syndrome coronavirus 2
  REGION 1..12: note = Table B: HLA-DRB1*01:02L HLA-DRB1*16:01L HLA-DRB1*04:08L
YKQARSEDKRAK

SEQ ID NO: 19584 - protein, 14 aa, Severe acute respiratory syndrome coronavirus 2
  REGION 1..14: note = Table B: HLA-DRB1*01:02L HLA-DPA1*01:03-B1*03:01L HLA-DRB1*12:01L
RAKVTSAMQTMLFT

SEQ ID NO: 19585 - protein, 14 aa, Severe acute respiratory syndrome coronavirus 2
  REGION 1..14: note = Table B: HLA-DRB1*01:02L
VTSAMQTMLFTMLR

SEQ ID NO: 19586 - protein, 13 aa, Severe acute respiratory syndrome coronavirus 2
  REGION 1..13: note = Table B: HLA-DRB1*01:02L HLA-DRB1*08:01L HLA-DPA1*01:03-B1*02:01L
SAMQTMLFTMLRK

SEQ ID NO: 19587 - protein, 13 aa, Severe acute respiratory syndrome coronavirus 2
  REGION 1..13: note = Table B: HLA-DRB1*01:02L HLA-DPA1*03:01-B1*04:02L HLA-DQA1*01:01-B1*05:01L HLA-DPA1*01:03-B1*104:01L
TAAKLMVVIPDYN

SEQ ID NO: 19588 - protein, 12 aa, Severe acute respiratory syndrome coronavirus 2
  REGION 1..12: note = Table B: HLA-DRB1*01:02L HLA-DRB3*02:01L
KLMVVIPDYNTY

SEQ ID NO: 19589 - protein, 11 aa, Severe acute respiratory syndrome coronavirus 2
  REGION 1..11: note = Table B: HLA-DRB1*01:02L
KIVQLSEISMD

SEQ ID NO: 19590 - protein, 13 aa, Severe acute respiratory syndrome coronavirus 2
  REGION 1..13: note = Table B: HLA-DRB1*01:02L
LAWPLIVTALRAN

SEQ ID NO: 19591 - protein, 13 aa, Severe acute respiratory syndrome coronavirus 2
  REGION 1..13: note = Table B: HLA-DRB1*01:02L
PLIVTALRANSAV

SEQ ID NO: 19592 - protein, 12 aa, Severe acute respiratory syndrome coronavirus 2
  REGION 1..12: note = Table B: HLA-DRB1*01:02L HLA-DRB1*04:08L
RANSAVKLQNNE

SEQ ID NO: 19593 - protein, 12 aa, Severe acute respiratory syndrome coronavirus 2
  REGION 1..12: note = Table B: HLA-DRB1*01:02L HLA-DRB1*15:03L
ANSAVKLQNNEL

SEQ ID NO: 19594 - protein, 14 aa, Severe acute respiratory syndrome coronavirus 2
  REGION 1..14: note = Table B: HLA-DRB1*01:02L
PVALRQMSCAAGTT

SEQ ID NO: 19595 - protein, 12 aa, Severe acute respiratory syndrome coronavirus 2
  REGION 1..12: note = Table B: HLA-DRB1*01:02L HLA-DRB1*08:04L HLA-DPA1*02:01-B1*13:01L HLA-DRB1*15:03L
VLALLSDLQDLK

SEQ ID NO: 19596 - protein, 14 aa, Severe acute respiratory syndrome coronavirus 2
  REGION 1..14: note = Table B: HLA-DRB1*01:02L HLA-DRB3*01:01L
LALLSDLQDLKWAR

SEQ ID NO: 19597 - protein, 13 aa, Severe acute respiratory syndrome coronavirus 2
  REGION 1..13: note = Table B: HLA-DRB1*01:02L HLA-DRB1*12:01L HLA-DQA1*01:03-B1*06:01L HLA-DQA1*02:01-B1*03:03L HLA-DRB1*15:03L
SDLQDLKWARFPK

SEQ ID NO: 19598 - protein, 14 aa, Severe acute respiratory syndrome coronavirus 2
  REGION 1..14: note = Table B: HLA-DRB1*01:02L HLA-DPA1*02:01-B1*13:01L
EPPCRFVTDTPKGP

SEQ ID NO: 19599 - protein, 13 aa, Severe acute respiratory syndrome coronavirus 2
  REGION 1..13: note = Table B: HLA-DRB1*01:02L HLA-DQA1*05:05-B1*03:116L HLA-DRB3*01:01L HLA-DRB1*08:02L HLA-DRB1*15:03L
LGSLAATVRLQAG

SEQ ID NO: 19600 - protein, 16 aa, Severe acute respiratory syndrome coronavirus 2
  REGION 1..16: note = Table B: HLA-DRB1*01:02L HLA-DPA1*01:03-B1*03:01L HLA-DRB1*12:01L HLA-DPA1*01:03-B1*104:01L
VPANSTVLSFCAFAVD

SEQ ID NO: 19601 - protein, 15 aa, Severe acute respiratory syndrome coronavirus 2
  REGION 1..15: note = Table B: HLA-DRB1*01:02L HLA-DRB1*08:04L
QPITNCVKMLCTHTG

SEQ ID NO: 19602 - protein, 15 aa, Severe acute respiratory syndrome coronavirus 2
  REGION 1..15: note = Table B: HLA-DRB1*01:02L
ITVTPEANMDQESFG

SEQ ID NO: 19603 - protein, 15 aa, Severe acute respiratory syndrome coronavirus 2
  REGION 1..15: note = Table B: HLA-DRB1*01:02L
HPNPKGFCDLKGKYV

SEQ ID NO: 19604 - protein, 14 aa, Severe acute respiratory syndrome coronavirus 2
  REGION 1..14: note = Table B: HLA-DRB1*01:02L HLA-DRB1*14:01L HLA-DRB1*12:01L HLA-DRB1*16:01L HLA-DRB1*15:03L
NPKGFCDLKGKYVQ

SEQ ID NO: 19605 - protein, 13 aa, Severe acute respiratory syndrome coronavirus 2
  REGION 1..13: note = Table B: HLA-DRB1*01:02L
KYVQIPTTCANDP

SEQ ID NO: 19606 - protein, 12 aa, Severe acute respiratory syndrome coronavirus 2
  REGION 1..12: note = Table B: HLA-DRB1*01:02L
FLNRVCGVSAAR

SEQ ID NO: 19607 - protein, 14 aa, Severe acute respiratory syndrome coronavirus 2
  REGION 1..14: note = Table B: HLA-DRB1*01:02L HLA-DRB1*04:08L
GTGTSTDVVYRAFD

SEQ ID NO: 19608 - protein, 12 aa, Severe acute respiratory syndrome coronavirus 2
  REGION 1..12: note = Table B: HLA-DRB1*01:02L HLA-DRB1*08:01L HLA-DRB1*12:01L HLA-DRB1*15:03L
KVAGFAKFLKTN

SEQ ID NO: 19609 - protein, 14 aa, Severe acute respiratory syndrome coronavirus 2
  REGION 1..14: note = Table B: HLA-DRB1*01:02L HLA-DRB1*11:01L
VAGFAKFLKTNCCR

SEQ ID NO: 19610 - protein, 16 aa, Severe acute respiratory syndrome coronavirus 2
  REGION 1..16: note = Table B: HLA-DRB1*01:02L HLA-DPA1*02:01-B1*13:01L
LKTNCCRFQEKDEDDN

SEQ ID NO: 19611 - protein, 12 aa, Severe acute respiratory syndrome coronavirus 2
  REGION 1..12: note = Table B: HLA-DRB1*01:02L HLA-DRB1*12:01L HLA-DPA1*03:01-B1*105:01L HLA-DRB1*15:03L
LIDSYFVVKRHT

SEQ ID NO: 19612 - protein, 12 aa, Severe acute respiratory syndrome coronavirus 2
  REGION 1..12: note = Table B: HLA-DRB1*01:02L HLA-DRB1*16:01L HLA-DRB1*04:08L
VVKRHTFSNYQH

SEQ ID NO: 19613 - protein, 13 aa, Severe acute respiratory syndrome coronavirus 2
  REGION 1..13: note = Table B: HLA-DRB1*01:02L HLA-DRB1*08:01L HLA-DPA1*02:01-B1*13:01L
VKRHTFSNYQHEE

SEQ ID NO: 19614 - protein, 13 aa, Severe acute respiratory syndrome coronavirus 2
  REGION 1..13: note = Table B: HLA-DRB1*01:02L
ETIYNLLKDCPAV

SEQ ID NO: 19615 - protein, 12 aa, Severe acute respiratory syndrome coronavirus 2
  REGION 1..12: note = Table B: HLA-DRB1*01:02L HLA-DRB1*15:03L
LKDCPAVAKHDF

SEQ ID NO: 19616 - protein, 12 aa, Severe acute respiratory syndrome coronavirus 2
  REGION 1..12: note = Table B: HLA-DRB1*01:02L
PAVAKHDFFKFR

SEQ ID NO: 19617 - protein, 12 aa, Severe acute respiratory syndrome coronavirus 2
  REGION 1..12: note = Table B: HLA-DRB1*01:02L HLA-DRB1*04:08L
RIDGDMVPHISR

SEQ ID NO: 19618 - protein, 12 aa, Severe acute respiratory syndrome coronavirus 2
  REGION 1..12: note = Table B: HLA-DRB1*01:02L HLA-DRB3*01:01L HLA-DRB1*04:08L HLA-DRB1*15:03L
DMVPHISRQRLT

SEQ ID NO: 19619 - protein, 12 aa, Severe acute respiratory syndrome coronavirus 2
  REGION 1..12: note = Table B: HLA-DRB1*01:02L
MVPHISRQRLTK

SEQ ID NO: 19620 - protein, 13 aa, Severe acute respiratory syndrome coronavirus 2
  REGION 1..13: note = Table B: HLA-DRB1*01:02L HLA-DRB1*16:01L
VPHISRQRLTKYT

SEQ ID NO: 19621 - protein, 14 aa, Severe acute respiratory syndrome coronavirus 2
  REGION 1..14: note = Table B: HLA-DRB1*01:02L
ISRQRLTKYTMADL

SEQ ID NO: 19622 - protein, 14 aa, Severe acute respiratory syndrome coronavirus 2
  REGION 1..14: note = Table B: HLA-DRB1*01:02L
SRQRLTKYTMADLV

SEQ ID NO: 19623 - protein, 12 aa, Severe acute respiratory syndrome coronavirus 2
  REGION 1..12: note = Table B: HLA-DRB1*01:02L HLA-DRB1*04:08L
KYTMADLVYALR

SEQ ID NO: 19624 - protein, 12 aa, Severe acute respiratory syndrome coronavirus 2
  REGION 1..12: note = Table B: HLA-DRB1*01:02L
YTMADLVYALRH

SEQ ID NO: 19625 - protein, 14 aa, Severe acute respiratory syndrome coronavirus 2
  REGION 1..14: note = Table B: HLA-DRB1*01:02L
TMADLVYALRHFDE

SEQ ID NO: 19626 - protein, 13 aa, Severe acute respiratory syndrome coronavirus 2
  REGION 1..13: note = Table B: HLA-DRB1*01:02L HLA-DRB1*12:01L
VYALRHFDEGNCD

SEQ ID NO: 19627 - protein, 12 aa, Severe acute respiratory syndrome coronavirus 2
  REGION 1..12: note = Table B: HLA-DRB1*01:02L HLA-DQA1*01-B1*05L HLA-DRB1*16:01L HLA-DRB1*15:03L
ALRHFDEGNCDT

SEQ ID NO: 19628 - protein, 14 aa, Severe acute respiratory syndrome coronavirus 2
  REGION 1..14: note = Table B: HLA-DRB1*01:02L HLA-DRB1*04:08L
LRHFDEGNCDTLKE

SEQ ID NO: 19629 - protein, 14 aa, Severe acute respiratory syndrome coronavirus 2
  REGION 1..14: note = Table B: HLA-DRB1*01:02L
GNCDTLKEILVTYN

SEQ ID NO: 19630 - protein, 16 aa, Severe acute respiratory syndrome coronavirus 2
  REGION 1..16: note = Table B: HLA-DRB1*01:02L
DTLKEILVTYNCCDDD

SEQ ID NO: 19631 - protein, 14 aa, Severe acute respiratory syndrome coronavirus 2
  REGION 1..14: note = Table B: HLA-DRB1*01:02L HLA-DRB1*15:03L
VTYNCCDDDYFNKK

SEQ ID NO: 19632 - protein, 13 aa, Severe acute respiratory syndrome coronavirus 2
  REGION 1..13: note = Table B: HLA-DRB1*01:02L HLA-DRB1*08:01L HLA-DRB1*12:01L
KKDWYDFVENPDI

SEQ ID NO: 19633 - protein, 11 aa, Severe acute respiratory syndrome coronavirus 2
  REGION 1..11: note = Table B: HLA-DRB1*01:02L HLA-DRB1*08:77L HLA-DPA1*01:03-B1*03:01L HLA-DQA1*05:05-B1*03:19L HLA-DRB1*04:10L HLA-DRB1*10:01L HLA-DRB1*04:08L HLA-DRB1*15:03L
YDFVENPDILR

SEQ ID NO: 19634 - protein, 14 aa, Severe acute respiratory syndrome coronavirus 2
  REGION 1..14: note = Table B: HLA-DRB1*01:02L
ANLGERVRQALLKT

SEQ ID NO: 19635 - protein, 12 aa, Severe acute respiratory syndrome coronavirus 2
  REGION 1..12: note = Table B: HLA-DRB1*01:02L
ERVRQALLKTVQ

SEQ ID NO: 19636 - protein, 12 aa, Severe acute respiratory syndrome coronavirus 2
  REGION 1..12: note = Table B: HLA-DRB1*01:02L HLA-DRB1*12:01L
RVRQALLKTVQF

SEQ ID NO: 19637 - protein, 14 aa, Severe acute respiratory syndrome coronavirus 2
  REGION 1..14: note = Table B: HLA-DRB1*01:02L HLA-DRB1*08:01L HLA-DRB1*11:01L HLA-DRB1*12:01L HLA-DQA1*02:01-B1*03:03L HLA-DRB1*15:03L
QALLKTVQFCDAMR

SEQ ID NO: 19638 - protein, 14 aa, Severe acute respiratory syndrome coronavirus 2
  REGION 1..14: note = Table B: HLA-DRB1*01:02L HLA-DQA1*05:05-B1*03:19L HLA-DPA1*03:01-B1*105:01L HLA-DRB1*04:08L HLA-DRB1*15:03L
VQFCDAMRNAGIVG

SEQ ID NO: 19639 - protein, 14 aa, Severe acute respiratory syndrome coronavirus 2
  REGION 1..14: note = Table B: HLA-DRB1*01:02L HLA-DPA1*01:03-B1*03:01L HLA-DRB1*08:01L HLA-DQA1*05:05-B1*03:19L HLA-DRB1*12:01L HLA-DRB1*15:03L
NWYDFGDFIQTTPG

SEQ ID NO: 19640 - protein, 13 aa, Severe acute respiratory syndrome coronavirus 2
  REGION 1..13: note = Table B: HLA-DRB1*01:02L HLA-DPA1*01:02-B1*04:01L
VDSYYSLLMPILT

SEQ ID NO: 19641 - protein, 13 aa, Severe acute respiratory syndrome coronavirus 2
  REGION 1..13: note = Table B: HLA-DRB1*01:02L
SYYSLLMPILTLT

SEQ ID NO: 19642 - protein, 14 aa, Severe acute respiratory syndrome coronavirus 2
  REGION 1..14: note = Table B: HLA-DRB1*01:02L HLA-DPA1*03:01-B1*105:01L
SLLMPILTLTRALT

SEQ ID NO: 19643 - protein, 16 aa, Severe acute respiratory syndrome coronavirus 2
  REGION 1..16: note = Table B: HLA-DRB1*01:02L
RALTAESHVDTDLTKP

SEQ ID NO: 19644 - protein, 12 aa, Severe acute respiratory syndrome coronavirus 2
  REGION 1..12: note = Table B: HLA-DRB1*01:02L HLA-DRB3*01:01L HLA-DRB1*04:08L
HVDTDLTKPYIK

SEQ ID NO: 19645 - protein, 15 aa, Severe acute respiratory syndrome coronavirus 2
  REGION 1..15: note = Table B: HLA-DRB1*01:02L
DTDLTKPYIKWDLLK

SEQ ID NO: 19646 - protein, 12 aa, Severe acute respiratory syndrome coronavirus 2
  REGION 1..12: note = Table B: HLA-DRB1*01:02L HLA-DPA1*03:01-B1*04:02L HLA-DRB1*08:01L HLA-DQA1*01-B1*05L HLA-DRB1*12:01L HLA-DPA1*03:01-B1*105:01L HLA-DPA1*01:02-B1*04:01L HLA-DRB1*04:08L HLA-DRB1*15:03L
KPYIKWDLLKYD

SEQ ID NO: 19647 - protein, 13 aa, Severe acute respiratory syndrome coronavirus 2
  REGION 1..13: note = Table B: HLA-DRB1*01:02L HLA-DRB1*08:04L HLA-DPA1*01:03-B1*03:01L HLA-DPA1*03:01-B1*04:02L HLA-DRB1*14:01L HLA-DRB3*01:01L HLA-DPA1*02:01-B1*13:01L HLA-DRB1*04:08L
WDLLKYDFTEERL

SEQ ID NO: 19648 - protein, 13 aa, Severe acute respiratory syndrome coronavirus 2
  REGION 1..13: note = Table B: HLA-DRB1*01:02L HLA-DPA1*01:02-B1*04:01L HLA-DRB1*15:03L
DFTEERLKLFDRY

SEQ ID NO: 19649 - protein, 13 aa, Severe acute respiratory syndrome coronavirus 2
  REGION 1..13: note = Table B: HLA-DRB1*01:02L
TEERLKLFDRYFK

SEQ ID NO: 19650 - protein, 13 aa, Severe acute respiratory syndrome coronavirus 2
  REGION 1..13: note = Table B: HLA-DRB1*01:02L HLA-DRB1*08:01L HLA-DQA1*01-B1*05L HLA-DRB1*12:01L HLA-DPA1*01:02-B1*04:01L HLA-DRB1*04:08L HLA-DRB1*15:03L
DRYFKYWDQTYHP

SEQ ID NO: 19651 - protein, 14 aa, Severe acute respiratory syndrome coronavirus 2
  REGION 1..14: note = Table B: HLA-DRB1*01:02L HLA-DRB1*15:03L
QTYHPNCVNCLDDR

SEQ ID NO: 19652 - protein, 15 aa, Severe acute respiratory syndrome coronavirus 2
  REGION 1..15: note = Table B: HLA-DRB1*01:02L
HPNCVNCLDDRCILH

SEQ ID NO: 19653 - protein, 14 aa, Severe acute respiratory syndrome coronavirus 2
  REGION 1..14: note = Table B: HLA-DRB1*01:02L HLA-DPA1*01:03-B1*03:01L HLA-DPA1*02:01-B1*13:01L
DDRCILHCANFNVL

SEQ ID NO: 19654 - protein, 14 aa, Severe acute respiratory syndrome coronavirus 2
  REGION 1..14: note = Table B: HLA-DRB1*01:02L HLA-DPA1*01:03-B1*04:02L
NVLFSTVFPPTSFG

SEQ ID NO: 19655 - protein, 14 aa, Severe acute respiratory syndrome coronavirus 2
  REGION 1..14: note = Table B: HLA-DRB1*01:02L HLA-DPA1*01:03-B1*04:02L
VLFSTVFPPTSFGP

SEQ ID NO: 19656 - protein, 13 aa, Severe acute respiratory syndrome coronavirus 2
  REGION 1..13: note = Table B: HLA-DRB1*01:02L HLA-DPA1*01:03-B1*03:01L HLA-DQA1*05:05-B1*03:01L
FSTVFPPTSFGPL

SEQ ID NO: 19657 - protein, 13 aa, Severe acute respiratory syndrome coronavirus 2
  REGION 1..13: note = Table B: HLA-DRB1*01:02L
TVFPPTSFGPLVR

SEQ ID NO: 19658 - protein, 12 aa, Severe acute respiratory syndrome coronavirus 2
  REGION 1..12: note = Table B: HLA-DRB1*01:02L HLA-DRB1*16:01L
FPPTSFGPLVRK

SEQ ID NO: 19659 - protein, 16 aa, Severe acute respiratory syndrome coronavirus 2
  REGION 1..16: note = Table B: HLA-DRB1*01:02L HLA-DRB1*08:04L HLA-DRB1*11:04L HLA-DRB1*11:01L
PPTSFGPLVRKIFVDG

SEQ ID NO: 19660 - protein, 13 aa, Severe acute respiratory syndrome coronavirus 2
  REGION 1..13: note = Table B: HLA-DRB1*01:02L HLA-DRB1*16:01L HLA-DRB1*15:03L
PLVRKIFVDGVPF

SEQ ID NO: 19661 - protein, 14 aa, Severe acute respiratory syndrome coronavirus 2
  REGION 1..14: note = Table B: HLA-DRB1*01:02L
VHNQDVNLHSSRLS

SEQ ID NO: 19662 - protein, 13 aa, Severe acute respiratory syndrome coronavirus 2
  REGION 1..13: note = Table B: HLA-DRB1*01:02L HLA-DRB1*12:01L HLA-DRB1*04:08L HLA-DRB1*15:03L
SFKELLVYAADPA

SEQ ID NO: 19663 - protein, 12 aa, Severe acute respiratory syndrome coronavirus 2
  REGION 1..12: note = Table B: HLA-DRB1*01:02L
AMHAASGNLLLD

SEQ ID NO: 19664 - protein, 15 aa, Severe acute respiratory syndrome coronavirus 2
  REGION 1..15: note = Table B: HLA-DRB1*01:02L HLA-DPA1*03:01-B1*105:01L HLA-DQA1*05:05-B1*03:01L HLA-DQA1*01:03-B1*06:01L HLA-DQA1*02:01-B1*03:03L
DKRTTCFSVAALTNN

SEQ ID NO: 19665 - protein, 15 aa, Severe acute respiratory syndrome coronavirus 2
  REGION 1..15: note = Table B: HLA-DRB1*01:02L
RTTCFSVAALTNNVA

SEQ ID NO: 19666 - protein, 11 aa, Severe acute respiratory syndrome coronavirus 2
  REGION 1..11: note = Table B: HLA-DRB1*01:02L HLA-DRB4*03:01NL HLA-DPA1*03:01-B1*04:02L HLA-DQA1*01-B1*05L HLA-DPA1*01:03-B1*04:01L HLA-DPA1*01:03-B1*04:02L HLA-DQA1*05:05-B1*03:01L HLA-DPA1*01:02-B1*04:01L
  REGION 1..11: note = CONT. FROM ABOVE: HLA-DRB1*10:01L
SVAALTNNVAF

SEQ ID NO: 19667 - protein, 13 aa, Severe acute respiratory syndrome coronavirus 2
  REGION 1..13: note = Table B: HLA-DRB1*01:02L HLA-DRB1*08:04L HLA-DRB1*15:03L
LTNNVAFQTVKPG

SEQ ID NO: 19668 - protein, 15 aa, Severe acute respiratory syndrome coronavirus 2
  REGION 1..15: note = Table B: HLA-DRB1*01:02L
PGNFNKDFYDFAVSK

SEQ ID NO: 19669 - protein, 15 aa, Severe acute respiratory syndrome coronavirus 2
  REGION 1..15: note = Table B: HLA-DRB1*01:02L HLA-DRB1*08:01L
AQDGNAAISDYDYYR

SEQ ID NO: 19670 - protein, 12 aa, Severe acute respiratory syndrome coronavirus 2
  REGION 1..12: note = Table B: HLA-DRB1*01:02L HLA-DRB1*14:01L
AAISDYDYYRYN

SEQ ID NO: 19671 - protein, 14 aa, Severe acute respiratory syndrome coronavirus 2
  REGION 1..14: note = Table B: HLA-DRB1*01:02L HLA-DRB1*14:01L
AISDYDYYRYNLPT

SEQ ID NO: 19672 - protein, 13 aa, Severe acute respiratory syndrome coronavirus 2
  REGION 1..13: note = Table B: HLA-DRB1*01:02L HLA-DPA1*03:01-B1*105:01L HLA-DRB1*16:01L HLA-DRB1*15:03L
DKYFDCYDGGCIN

SEQ ID NO: 19673 - protein, 14 aa, Severe acute respiratory syndrome coronavirus 2
  REGION 1..14: note = Table B: HLA-DRB1*01:02L HLA-DRB1*08:01L
PFNKWGKARLYYDS

SEQ ID NO: 19674 - protein, 14 aa, Severe acute respiratory syndrome coronavirus 2
  REGION 1..14: note = Table B: HLA-DRB1*01:02L HLA-DRB1*08:04L HLA-DPA1*01:03-B1*03:01L HLA-DPA1*01:03-B1*04:02L HLA-DPA1*01:02-B1*04:01L HLA-DQA1*01:03-B1*06:01L
ARLYYDSMSYEDQD

SEQ ID NO: 19675 - protein, 14 aa, Severe acute respiratory syndrome coronavirus 2
  REGION 1..14: note = Table B: HLA-DRB1*01:02L HLA-DRB1*04:08L
SMSYEDQDALFAYT

SEQ ID NO: 19676 - protein, 13 aa, Severe acute respiratory syndrome coronavirus 2
  REGION 1..13: note = Table B: HLA-DRB1*01:02L HLA-DQA1*05:05-B1*03:01L HLA-DRB1*04:08L
SYEDQDALFAYTK

SEQ ID NO: 19677 - protein, 13 aa, Severe acute respiratory syndrome coronavirus 2
  REGION 1..13: note = Table B: HLA-DRB1*01:02L HLA-DPA1*01:03-B1*03:01L HLA-DPA1*02:01-B1*13:01L HLA-DRB1*16:01L HLA-DRB1*15:03L
TKRNVIPTITQMN

SEQ ID NO: 19678 - protein, 14 aa, Severe acute respiratory syndrome coronavirus 2
  REGION 1..14: note = Table B: HLA-DRB1*01:02L HLA-DPA1*03:01-B1*105:01L
TVAGVSICSTMTNR

SEQ ID NO: 19679 - protein, 12 aa, Severe acute respiratory syndrome coronavirus 2
  REGION 1..12: note = Table B: HLA-DRB1*01:02L HLA-DRB1*12:01L HLA-DPA1*03:01-B1*105:01L HLA-DRB1*15:03L
VSICSTMTNRQF

SEQ ID NO: 19680 - protein, 13 aa, Severe acute respiratory syndrome coronavirus 2
  REGION 1..13: note = Table B: HLA-DRB1*01:02L
ICSTMTNRQFHQK

SEQ ID NO: 19681 - protein, 14 aa, Severe acute respiratory syndrome coronavirus 2
  REGION 1..14: note = Table B: HLA-DRB1*01:02L
STMTNRQFHQKLLK

SEQ ID NO: 19682 - protein, 14 aa, Severe acute respiratory syndrome coronavirus 2
  REGION 1..14: note = Table B: HLA-DRB1*01:02L
TMTNRQFHQKLLKS

SEQ ID NO: 19683 - protein, 14 aa, Severe acute respiratory syndrome coronavirus 2
  REGION 1..14: note = Table B: HLA-DRB1*01:02L HLA-DRB1*11:01L HLA-DRB1*12:01L HLA-DPA1*03:01-B1*105:01L HLA-DRB1*15:03L
RQFHQKLLKSIAAT

SEQ ID NO: 19684 - protein, 13 aa, Severe acute respiratory syndrome coronavirus 2
  REGION 1..13: note = Table B: HLA-DRB1*01:02L
FHQKLLKSIAATR

SEQ ID NO: 19685 - protein, 12 aa, Severe acute respiratory syndrome coronavirus 2
  REGION 1..12: note = Table B: HLA-DRB1*01:02L
KLLKSIAATRGA

SEQ ID NO: 19686 - protein, 13 aa, Severe acute respiratory syndrome coronavirus 2
  REGION 1..13: note = Table B: HLA-DRB1*01:02L HLA-DRB1*08:04L
GATVVIGTSKFYG

SEQ ID NO: 19687 - protein, 14 aa, Severe acute respiratory syndrome coronavirus 2
  REGION 1..14: note = Table B: HLA-DRB1*01:02L
ATVVIGTSKFYGGW

SEQ ID NO: 19688 - protein, 14 aa, Severe acute respiratory syndrome coronavirus 2
  REGION 1..14: note = Table B: HLA-DRB1*01:02L HLA-DRB1*16:01L
MPNMLRIMASLVLA

SEQ ID NO: 19689 - protein, 14 aa, Severe acute respiratory syndrome coronavirus 2
  REGION 1..14: note = Table B: HLA-DRB1*01:02L
KHTTCCSLSHRFYR

SEQ ID NO: 19690 - protein, 14 aa, Severe acute respiratory syndrome coronavirus 2
  REGION 1..14: note = Table B: HLA-DRB1*01:02L HLA-DRB1*15:03L
LSEMVMCGGSLYVK

SEQ ID NO: 19691 - protein, 16 aa, Severe acute respiratory syndrome coronavirus 2
  REGION 1..16: note = Table B: HLA-DRB1*01:02L
YVKPGGTSSGDATTAY

SEQ ID NO: 19692 - protein, 13 aa, Severe acute respiratory syndrome coronavirus 2
  REGION 1..13: note = Table B: HLA-DRB1*01:02L HLA-DRB1*08:01L HLA-DRB1*11:01L HLA-DPA1*01:03-B1*104:01L
TTAYANSVFNICQ

SEQ ID NO: 19693 - protein, 11 aa, Severe acute respiratory syndrome coronavirus 2
  REGION 1..11: note = Table B: HLA-DRB1*01:02L
LLSTDGNKIAD

SEQ ID NO: 19694 - protein, 14 aa, Severe acute respiratory syndrome coronavirus 2
  REGION 1..14: note = Table B: HLA-DRB1*01:02L
LSTDGNKIADKYVR

SEQ ID NO: 19695 - protein, 13 aa, Severe acute respiratory syndrome coronavirus 2
  REGION 1..13: note = Table B: HLA-DRB1*01:02L
NKIADKYVRNLQH

SEQ ID NO: 19696 - protein, 13 aa, Severe acute respiratory syndrome coronavirus 2
  REGION 1..13: note = Table B: HLA-DRB1*01:02L HLA-DRB1*04:08L
KIADKYVRNLQHR

SEQ ID NO: 19697 - protein, 13 aa, Severe acute respiratory syndrome coronavirus 2
  REGION 1..13: note = Table B: HLA-DRB1*01:02L HLA-DRB1*04:08L
RNRDVDTDFVNEF

SEQ ID NO: 19698 - protein, 12 aa, Severe acute respiratory syndrome coronavirus 2
  REGION 1..12: note = Table B: HLA-DRB1*01:02L HLA-DRB1*08:01L HLA-DRB1*15:03L
TDFVNEFYAYLR

SEQ ID NO: 19699 - protein, 12 aa, Severe acute respiratory syndrome coronavirus 2
  REGION 1..12: note = Table B: HLA-DRB1*01:02L HLA-DRB1*11:04L HLA-DRB1*08:01L HLA-DRB1*11:01L HLA-DRB3*01:01L HLA-DRB1*15:03L
DFVNEFYAYLRK

SEQ ID NO: 19700 - protein, 14 aa, Severe acute respiratory syndrome coronavirus 2
  REGION 1..14: note = Table B: HLA-DRB1*01:02L HLA-DRB1*16:01L HLA-DRB1*15:03L
AYLRKHFSMMILSD

SEQ ID NO: 19701 - protein, 12 aa, Severe acute respiratory syndrome coronavirus 2
  REGION 1..12: note = Table B: HLA-DRB1*01:02L HLA-DPA1*01:03-B1*03:01L HLA-DRB1*03:01L HLA-DRB1*12:01L HLA-DRB1*16:01L HLA-DRB1*15:03L
MILSDDAVVCFN

SEQ ID NO: 19702 - protein, 12 aa, Severe acute respiratory syndrome coronavirus 2
  REGION 1..12: note = Table B: HLA-DRB1*01:02L HLA-DPA1*01:03-B1*04:02L HLA-DRB1*04:08L
TYASQGLVASIK

SEQ ID NO: 19703 - protein, 11 aa, Severe acute respiratory syndrome coronavirus 2
  REGION 1..11: note = Table B: HLA-DRB1*01:02L
ASIKNFKSVLY

SEQ ID NO: 19704 - protein, 14 aa, Severe acute respiratory syndrome coronavirus 2
  REGION 1..14: note = Table B: HLA-DRB1*01:02L HLA-DRB1*08:04L HLA-DPA1*01:03-B1*04:02L HLA-DQA1*05:05-B1*03:01L HLA-DRB1*04:08L
NNVFMSEAKCWTET

SEQ ID NO: 19705 - protein, 14 aa, Severe acute respiratory syndrome coronavirus 2
  REGION 1..14: note = Table B: HLA-DRB1*01:02L HLA-DRB1*08:01L HLA-DRB1*04:08L
AKCWTETDLTKGPH

SEQ ID NO: 19706 - protein, 15 aa, Severe acute respiratory syndrome coronavirus 2
  REGION 1..15: note = Table B: HLA-DRB1*01:02L HLA-DPA1*02:01-B1*13:01L
DLTKGPHEFCSQHTM

SEQ ID NO: 19707 - protein, 15 aa, Severe acute respiratory syndrome coronavirus 2
  REGION 1..15: note = Table B: HLA-DRB1*01:02L
EFCSQHTMLVKQGDD

SEQ ID NO: 19708 - protein, 13 aa, Severe acute respiratory syndrome coronavirus 2
  REGION 1..13: note = Table B: HLA-DRB1*01:02L HLA-DRB1*14:01L HLA-DPA1*02:01-B1*13:01L HLA-DPA1*01:02-B1*04:01L HLA-DRB1*04:08L
SQHTMLVKQGDDY

SEQ ID NO: 19709 - protein, 14 aa, Severe acute respiratory syndrome coronavirus 2
  REGION 1..14: note = Table B: HLA-DRB1*01:02L
QHTMLVKQGDDYVY

SEQ ID NO: 19710 - protein, 15 aa, Severe acute respiratory syndrome coronavirus 2
  REGION 1..15: note = Table B: HLA-DRB1*01:02L
HTMLVKQGDDYVYLP

SEQ ID NO: 19711 - protein, 16 aa, Severe acute respiratory syndrome coronavirus 2
  REGION 1..16: note = Table B: HLA-DRB1*01:02L
VKQGDDYVYLPYPDPS

SEQ ID NO: 19712 - protein, 19 aa, Severe acute respiratory syndrome coronavirus 2
  REGION 1..19: note = Table B: HLA-DRB1*01:02L
YPDPSRILGAGCFVDDIVK

SEQ ID NO: 19713 - protein, 12 aa, Severe acute respiratory syndrome coronavirus 2
  REGION 1..12: note = Table B: HLA-DRB1*01:02L
VKTDGTLMIERF

SEQ ID NO: 19714 - protein, 12 aa, Severe acute respiratory syndrome coronavirus 2
  REGION 1..12: note = Table B: HLA-DRB1*01:02L HLA-DPA1*01:03-B1*03:01L HLA-DPA1*03:01-B1*04:02L HLA-DRB1*12:01L HLA-DPA1*02:01-B1*13:01L HLA-DPA1*03:01-B1*105:01L HLA-DRB1*16:01L
MIERFVSLAIDA

SEQ ID NO: 19715 - protein, 12 aa, Severe acute respiratory syndrome coronavirus 2
  REGION 1..12: note = Table B: HLA-DRB1*01:02L HLA-DPA1*01:03-B1*03:01L HLA-DPA1*03:01-B1*04:02L HLA-DQA1*05:01-B1*02:01L HLA-DRB1*12:01L HLA-DPA1*03:01-B1*105:01L HLA-DPA1*01:03-B1*104:01L
IERFVSLAIDAY

SEQ ID NO: 19716 - protein, 12 aa, Severe acute respiratory syndrome coronavirus 2
  REGION 1..12: note = Table B: HLA-DRB1*01:02L
AYPLTKHPNQEY

SEQ ID NO: 19717 - protein, 12 aa, Severe acute respiratory syndrome coronavirus 2
  REGION 1..12: note = Table B: HLA-DRB1*01:02L
YPLTKHPNQEYA

SEQ ID NO: 19718 - protein, 13 aa, Severe acute respiratory syndrome coronavirus 2
  REGION 1..13: note = Table B: HLA-DRB1*01:02L HLA-DPA1*02:01-B1*13:01L
TKHPNQEYADVFH

SEQ ID NO: 19719 - protein, 13 aa, Severe acute respiratory syndrome coronavirus 2
  REGION 1..13: note = Table B: HLA-DRB1*01:02L HLA-DRB3*02:01L
HPNQEYADVFHLY

SEQ ID NO: 19720 - protein, 12 aa, Severe acute respiratory syndrome coronavirus 2
  REGION 1..12: note = Table B: HLA-DRB1*01:02L HLA-DRB1*16:01L HLA-DRB1*15:03L
FHLYLQYIRKLH

SEQ ID NO: 19721 - protein, 13 aa, Severe acute respiratory syndrome coronavirus 2
  REGION 1..13: note = Table B: HLA-DRB1*01:02L
RKLHDELTGHMLD

SEQ ID NO: 19722 - protein, 12 aa, Severe acute respiratory syndrome coronavirus 2
  REGION 1..12: note = Table B: HLA-DRB1*01:02L
DELTGHMLDMYS

SEQ ID NO: 19723 - protein, 14 aa, Severe acute respiratory syndrome coronavirus 2
  REGION 1..14: note = Table B: HLA-DRB1*01:02L
HMLDMYSVMLTNDN

SEQ ID NO: 19724 - protein, 12 aa, Severe acute respiratory syndrome coronavirus 2
  REGION 1..12: note = Table B: HLA-DRB1*01:02L HLA-DRB1*08:04L HLA-DRB3*02:01L
VMLTNDNTSRYW

SEQ ID NO: 19725 - protein, 14 aa, Severe acute respiratory syndrome coronavirus 2
  REGION 1..14: note = Table B: HLA-DRB1*01:02L
SQTSLRCGACIRRP

SEQ ID NO: 19726 - protein, 14 aa, Severe acute respiratory syndrome coronavirus 2
  REGION 1..14: note = Table B: HLA-DRB1*01:02L
QTSLRCGACIRRPF

SEQ ID NO: 19727 - protein, 15 aa, Severe acute respiratory syndrome coronavirus 2
  REGION 1..15: note = Table B: HLA-DRB1*01:02L HLA-DPA1*02:01-B1*13:01L HLA-DPA1*03:01-B1*105:01L
VISTSHKLVLSVNPY

SEQ ID NO: 19728 - protein, 13 aa, Severe acute respiratory syndrome coronavirus 2
  REGION 1..13: note = Table B: HLA-DRB1*01:02L HLA-DRB1*12:01L HLA-DRB1*16:01L HLA-DRB1*15:03L
HKLVLSVNPYVCN

SEQ ID NO: 19729 - protein, 15 aa, Severe acute respiratory syndrome coronavirus 2
  REGION 1..15: note = Table B: HLA-DRB1*01:02L
DVTQLYLGGMSYYCK

SEQ ID NO: 19730 - protein, 15 aa, Severe acute respiratory syndrome coronavirus 2
  REGION 1..15: note = Table B: HLA-DRB1*01:02L
VTQLYLGGMSYYCKS

SEQ ID NO: 19731 - protein, 15 aa, Severe acute respiratory syndrome coronavirus 2
  REGION 1..15: note = Table B: HLA-DRB1*01:02L
TQLYLGGMSYYCKSH

SEQ ID NO: 19732 - protein, 16 aa, Severe acute respiratory syndrome coronavirus 2
  REGION 1..16: note = Table B: HLA-DRB1*01:02L HLA-DPA1*01:03-B1*03:01L HLA-DQA1*05:05-B1*03:19L HLA-DPA1*02:01-B1*13:01L HLA-DPA1*03:01-B1*105:01L HLA-DPA1*01:03-B1*104:01L HLA-DQA1*05:05-B1*03:01L HLA-DQA1*01:03-B1*06:01L
  REGION 1..16: note = CONT. FROM ABOVE: HLA-DQA1*02:01-B1*03:03L HLA-DRB1*15:03L
KPPISFPLCANGQVFG

SEQ ID NO: 19733 - protein, 12 aa, Severe acute respiratory syndrome coronavirus 2
  REGION 1..12: note = Table B: HLA-DRB1*01:02L HLA-DRB1*16:01L
QVFGLYKNTCVG

SEQ ID NO: 19734 - protein, 10 aa, Severe acute respiratory syndrome coronavirus 2
  REGION 1..10: note = Table B: HLA-DRB1*01:02L HLA-DQA1*01-B1*05L HLA-DRB1*16:01L HLA-DRB1*15:03L
LKLFAAETLK

SEQ ID NO: 19735 - protein, 13 aa, Severe acute respiratory syndrome coronavirus 2
  REGION 1..13: note = Table B: HLA-DRB1*01:02L
ETLKATEETFKLS

SEQ ID NO: 19736 - protein, 14 aa, Severe acute respiratory syndrome coronavirus 2
  REGION 1..14: note = Table B: HLA-DRB1*01:02L HLA-DPA1*02:01-B1*13:01L
TLKATEETFKLSYG

SEQ ID NO: 19737 - protein, 12 aa, Severe acute respiratory syndrome coronavirus 2
  REGION 1..12: note = Table B: HLA-DRB1*01:02L HLA-DPA1*01:03-B1*03:01L HLA-DRB1*12:01L
LSYGIATVREVL

SEQ ID NO: 19738 - protein, 12 aa, Severe acute respiratory syndrome coronavirus 2
  REGION 1..12: note = Table B: HLA-DRB1*01:02L
SYGIATVREVLS

SEQ ID NO: 19739 - protein, 14 aa, Severe acute respiratory syndrome coronavirus 2
  REGION 1..14: note = Table B: HLA-DRB1*01:02L HLA-DRB1*16:01L
DRELHLSWEVGKPR

SEQ ID NO: 19740 - protein, 12 aa, Severe acute respiratory syndrome coronavirus 2
  REGION 1..12: note = Table B: HLA-DRB1*01:02L HLA-DRB1*14:01L HLA-DRB1*08:01L HLA-DPA1*02:01-B1*13:01L HLA-DQA1*02:01-B1*03:03L HLA-DRB1*15:03L
NRNYVFTGYRVT

SEQ ID NO: 19741 - protein, 14 aa, Severe acute respiratory syndrome coronavirus 2
  REGION 1..14: note = Table B: HLA-DRB1*01:02L HLA-DRB1*12:01L HLA-DPA1*02:01-B1*13:01L HLA-DRB1*15:03L
SKVQIGEYTFEKGD

SEQ ID NO: 19742 - protein, 14 aa, Severe acute respiratory syndrome coronavirus 2
  REGION 1..14: note = Table B: HLA-DRB1*01:02L
YTFEKGDYGDAVVY

SEQ ID NO: 19743 - protein, 14 aa, Severe acute respiratory syndrome coronavirus 2
  REGION 1..14: note = Table B: HLA-DRB1*01:02L HLA-DRB1*04:08L
TFEKGDYGDAVVYR

SEQ ID NO: 19744 - protein, 14 aa, Severe acute respiratory syndrome coronavirus 2
  REGION 1..14: note = Table B: HLA-DRB1*01:02L
FEKGDYGDAVVYRG

SEQ ID NO: 19745 - protein, 10 aa, Severe acute respiratory syndrome coronavirus 2
  REGION 1..10: note = Table B: HLA-DRB1*01:02L HLA-DRB1*16:01L HLA-DQA1*02:01-B1*03:03L HLA-DRB1*15:03L
YRGTTTYKLN

SEQ ID NO: 19746 - protein, 13 aa, Severe acute respiratory syndrome coronavirus 2
  REGION 1..13: note = Table B: HLA-DRB1*01:02L HLA-DRB1*08:01L HLA-DRB1*04:08L
RGTTTYKLNVGDY

SEQ ID NO: 19747 - protein, 11 aa, Severe acute respiratory syndrome coronavirus 2
  REGION 1..11: note = Table B: HLA-DRB1*01:02L HLA-DRB1*12:01L HLA-DRB1*16:01L HLA-DRB1*15:03L
YFVLTSHTVMP

SEQ ID NO: 19748 - protein, 12 aa, Severe acute respiratory syndrome coronavirus 2
  REGION 1..12: note = Table B: HLA-DRB1*01:02L HLA-DPA1*01:03-B1*03:01L HLA-DQA1*05:05-B1*03:19L HLA-DRB1*15:03L
YVRITGLYPTLN

SEQ ID NO: 19749 - protein, 13 aa, Severe acute respiratory syndrome coronavirus 2
  REGION 1..13: note = Table B: HLA-DRB1*01:02L
RITGLYPTLNISD

SEQ ID NO: 19750 - protein, 15 aa, Severe acute respiratory syndrome coronavirus 2
  REGION 1..15: note = Table B: HLA-DRB1*01:02L HLA-DQA1*05:05-B1*03:01L
YPTLNISDEFSSNVA

SEQ ID NO: 19751 - protein, 12 aa, Severe acute respiratory syndrome coronavirus 2
  REGION 1..12: note = Table B: HLA-DRB1*01:02L
ANYQKVGMQKYS

SEQ ID NO: 19752 - protein, 12 aa, Severe acute respiratory syndrome coronavirus 2
  REGION 1..12: note = Table B: HLA-DRB1*01:02L
NYQKVGMQKYST

SEQ ID NO: 19753 - protein, 14 aa, Severe acute respiratory syndrome coronavirus 2
  REGION 1..14: note = Table B: HLA-DRB1*01:02L HLA-DQA1*01-B1*05L HLA-DRB1*04:08L HLA-DRB1*15:03L
KVGMQKYSTLQGPP

SEQ ID NO: 19754 - protein, 14 aa, Severe acute respiratory syndrome coronavirus 2
  REGION 1..14: note = Table B: HLA-DRB1*01:02L HLA-DPA1*01:03-B1*02:01L HLA-DQA1*05:05-B1*03:01L HLA-DRB1*04:08L
SHFAIGLALYYPSA

SEQ ID NO: 19755 - protein, 12 aa, Severe acute respiratory syndrome coronavirus 2
  REGION 1..12: note = Table B: HLA-DRB1*01:02L HLA-DRB1*12:01L
GLALYYPSARIV

SEQ ID NO: 19756 - protein, 15 aa, Severe acute respiratory syndrome coronavirus 2
  REGION 1..15: note = Table B: HLA-DRB1*01:02L HLA-DRB1*14:01L HLA-DRB1*12:01L HLA-DRB1*15:03L
VDALCEKALKYLPID

SEQ ID NO: 19757 - protein, 14 aa, Severe acute respiratory syndrome coronavirus 2
  REGION 1..14: note = Table B: HLA-DRB1*01:02L HLA-DRB1*14:01L HLA-DRB1*15:03L
LKYLPIDKCSRIIP

SEQ ID NO: 19758 - protein, 14 aa, Severe acute respiratory syndrome coronavirus 2
  REGION 1..14: note = Table B: HLA-DRB1*01:02L HLA-DRB1*04:08L
PIDKCSRIIPARAR

SEQ ID NO: 19759 - protein, 14 aa, Severe acute respiratory syndrome coronavirus 2
  REGION 1..14: note = Table B: HLA-DRB1*01:02L
IPARARVECFDKFK

SEQ ID NO: 19760 - protein, 13 aa, Severe acute respiratory syndrome coronavirus 2
  REGION 1..13: note = Table B: HLA-DRB1*01:02L HLA-DRB1*08:01L HLA-DRB3*01:01L HLA-DRB1*16:01L HLA-DRB1*04:08L
RARVECFDKFKVN

SEQ ID NO: 19761 - protein, 14 aa, Severe acute respiratory syndrome coronavirus 2
  REGION 1..14: note = Table B: HLA-DRB1*01:02L HLA-DPA1*03:01-B1*04:02L HLA-DPA1*01:03-B1*04:02L HLA-DRB1*04:08L HLA-DRB1*15:03L
QYVFCTVNALPETT

SEQ ID NO: 19762 - protein, 15 aa, Severe acute respiratory syndrome coronavirus 2
  REGION 1..15: note = Table B: HLA-DRB1*01:02L HLA-DPA1*01:03-B1*03:01L HLA-DPA1*03:01-B1*04:02L HLA-DPA1*01:03-B1*04:02L HLA-DPA1*02:01-B1*13:01L
LPETTADIVVFDEIS

SEQ ID NO: 19763 - protein, 14 aa, Severe acute respiratory syndrome coronavirus 2
  REGION 1..14: note = Table B: HLA-DRB1*01:02L HLA-DPA1*01:03-B1*03:01L HLA-DPA1*02:01-B1*13:01L HLA-DRB1*15:03L
SMATNYDLSVVNAR

SEQ ID NO: 19764 - protein, 13 aa, Severe acute respiratory syndrome coronavirus 2
  REGION 1..13: note = Table B: HLA-DRB1*01:02L HLA-DPA1*01:03-B1*03:01L HLA-DPA1*02:01-B1*13:01L HLA-DRB1*15:03L
ATNYDLSVVNARL

SEQ ID NO: 19765 - protein, 12 aa, Severe acute respiratory syndrome coronavirus 2
  REGION 1..12: note = Table B: HLA-DRB1*01:02L HLA-DPA1*03:01-B1*105:01L HLA-DRB1*04:08L
NYDLSVVNARLR

SEQ ID NO: 19766 - protein, 12 aa, Severe acute respiratory syndrome coronavirus 2
  REGION 1..12: note = Table B: HLA-DRB1*01:02L HLA-DRB1*15:03L
YDLSVVNARLRA

SEQ ID NO: 19767 - protein, 12 aa, Severe acute respiratory syndrome coronavirus 2
  REGION 1..12: note = Table B: HLA-DRB1*01:02L HLA-DRB1*16:01L HLA-DRB1*04:08L HLA-DRB1*15:03L
DLSVVNARLRAK

SEQ ID NO: 19768 - protein, 12 aa, Severe acute respiratory syndrome coronavirus 2
  REGION 1..12: note = Table B: HLA-DRB1*01:02L HLA-DRB1*16:01L
LSVVNARLRAKH

SEQ ID NO: 19769 - protein, 12 aa, Severe acute respiratory syndrome coronavirus 2
  REGION 1..12: note = Table B: HLA-DRB1*01:02L HLA-DRB1*16:01L
SVVNARLRAKHY

SEQ ID NO: 19770 - protein, 13 aa, Severe acute respiratory syndrome coronavirus 2
  REGION 1..13: note = Table B: HLA-DRB1*01:02L HLA-DPA1*03:01-B1*04:02L HLA-DRB1*08:01L HLA-DRB1*12:01L
NARLRAKHYVYIG

SEQ ID NO: 19771 - protein, 14 aa, Severe acute respiratory syndrome coronavirus 2
  REGION 1..14: note = Table B: HLA-DRB1*01:02L HLA-DPA1*03:01-B1*04:02L HLA-DRB1*08:01L HLA-DRB1*12:01L HLA-DPA1*03:01-B1*105:01L
ARLRAKHYVYIGDP

SEQ ID NO: 19772 - protein, 12 aa, Severe acute respiratory syndrome coronavirus 2
  REGION 1..12: note = Table B: HLA-DRB1*01:02L HLA-DPA1*01:03-B1*03:01L HLA-DPA1*03:01-B1*105:01L
IGDPAQLPAPRT

SEQ ID NO: 19773 - protein, 15 aa, Severe acute respiratory syndrome coronavirus 2
  REGION 1..15: note = Table B: HLA-DRB1*01:02L
APRTLLTKGTLEPEY

SEQ ID NO: 19774 - protein, 14 aa, Severe acute respiratory syndrome coronavirus 2
  REGION 1..14: note = Table B: HLA-DRB1*01:02L HLA-DRB3*02:01L
TLLTKGTLEPEYFN

SEQ ID NO: 19775 - protein, 14 aa, Severe acute respiratory syndrome coronavirus 2
  REGION 1..14: note = Table B: HLA-DRB1*01:02L
RLMKTIGPDMFLGT

SEQ ID NO: 19776 - protein, 14 aa, Severe acute respiratory syndrome coronavirus 2
  REGION 1..14: note = Table B: HLA-DRB1*01:02L
LGTCRRCPAEIVDT

SEQ ID NO: 19777 - protein, 11 aa, Severe acute respiratory syndrome coronavirus 2
  REGION 1..11: note = Table B: HLA-DRB1*01:02L
VYDNKLKAHKD

SEQ ID NO: 19778 - protein, 14 aa, Severe acute respiratory syndrome coronavirus 2
  REGION 1..14: note = Table B: HLA-DRB1*01:02L
KLKAHKDKSAQCFK

SEQ ID NO: 19779 - protein, 15 aa, Severe acute respiratory syndrome coronavirus 2
  REGION 1..15: note = Table B: HLA-DRB1*01:02L HLA-DQA1*02:01-B1*03:03L
AHKDKSAQCFKMFYK

SEQ ID NO: 19780 - protein, 12 aa, Severe acute respiratory syndrome coronavirus 2
  REGION 1..12: note = Table B: HLA-DRB1*01:02L
AINRPQIGVVRE

SEQ ID NO: 19781 - protein, 12 aa, Severe acute respiratory syndrome coronavirus 2
  REGION 1..12: note = Table B: HLA-DRB1*01:02L HLA-DRB1*16:01L HLA-DRB1*15:03L
PQIGVVREFLTR

SEQ ID NO: 19782 - protein, 11 aa, Severe acute respiratory syndrome coronavirus 2
  REGION 1..11: note = Table B: HLA-DRB1*01:02L
FLTRNPAWRKA

SEQ ID NO: 19783 - protein, 14 aa, Severe acute respiratory syndrome coronavirus 2
  REGION 1..14: note = Table B: HLA-DRB1*01:02L HLA-DRB1*08:04L HLA-DRB3*02:01L HLA-DRB1*14:01L HLA-DRB1*04:10L HLA-DRB1*12:02L HLA-DPA1*02:01-B1*13:01L HLA-DRB1*14:54L HLA-DQA1*01:03-B1*06:01L HLA-DRB1*04:08L
LPTQTVDSSQGSEY

SEQ ID NO: 19784 - protein, 15 aa, Severe acute respiratory syndrome coronavirus 2
  REGION 1..15: note = Table B: HLA-DRB1*01:02L
AHSCNVNRFNVAITR

SEQ ID NO: 19785 - protein, 14 aa, Severe acute respiratory syndrome coronavirus 2
  REGION 1..14: note = Table B: HLA-DRB1*01:02L HLA-DPA1*01:03-B1*03:01L HLA-DRB1*12:01L HLA-DPA1*02:01-B1*13:01L HLA-DPA1*03:01-B1*105:01L HLA-DQA1*03:01-B1*03:02L HLA-DRB1*16:01L HLA-DRB1*04:08L HLA-DRB1*15:03L
AKVGILCIMSDRDL

SEQ ID NO: 19786 - protein, 13 aa, Severe acute respiratory syndrome coronavirus 2
  REGION 1..13: note = Table B: HLA-DRB1*01:02L
ILCIMSDRDLYDK

SEQ ID NO: 19787 - protein, 11 aa, Severe acute respiratory syndrome coronavirus 2
  REGION 1..11: note = Table B: HLA-DRB1*01:02L HLA-DPA1*01:03-B1*04:02L HLA-DRB1*12:01L HLA-DRB1*10:01L HLA-DQA1*01:03-B1*06:01L HLA-DRB1*08:03L
ATLQAENVTGL

SEQ ID NO: 19788 - protein, 14 aa, Severe acute respiratory syndrome coronavirus 2
  REGION 1..14: note = Table B: HLA-DRB1*01:02L HLA-DRB1*08:01L
QAENVTGLFKDCSK

SEQ ID NO: 19789 - protein, 14 aa, Severe acute respiratory syndrome coronavirus 2
  REGION 1..14: note = Table B: HLA-DRB1*01:02L
GLHPTQAPTHLSVD

SEQ ID NO: 19790 - protein, 10 aa, Severe acute respiratory syndrome coronavirus 2
  REGION 1..10: note = Table B: HLA-DRB1*01:02L HLA-DRB1*12:01L HLA-DRB1*15:03L
LISMMGFKMN

SEQ ID NO: 19791 - protein, 12 aa, Severe acute respiratory syndrome coronavirus 2
  REGION 1..12: note = Table B: HLA-DRB1*01:02L HLA-DRB1*12:01L HLA-DRB1*16:01L HLA-DQA1*01:03-B1*06:01L HLA-DQA1*02:01-B1*03:03L HLA-DRB1*15:03L
AIRHVRAWIGFD

SEQ ID NO: 19792 - protein, 13 aa, Severe acute respiratory syndrome coronavirus 2
  REGION 1..13: note = Table B: HLA-DRB1*01:02L HLA-DPA1*03:01-B1*04:02L HLA-DPA1*01:03-B1*04:02L HLA-DPA1*03:01-B1*105:01L HLA-DPA1*01:02-B1*04:01L HLA-DRB1*16:01L HLA-DRB1*04:08L
VRAWIGFDVEGCH

SEQ ID NO: 19793 - protein, 14 aa, Severe acute respiratory syndrome coronavirus 2
  REGION 1..14: note = Table B: HLA-DRB1*01:02L HLA-DRB1*04:08L HLA-DRB1*15:03L
AWIGFDVEGCHATR

SEQ ID NO: 19794 - protein, 13 aa, Severe acute respiratory syndrome coronavirus 2
  REGION 1..13: note = Table B: HLA-DRB1*01:02L HLA-DRB1*04:08L
GFDVEGCHATREA

SEQ ID NO: 19795 - protein, 14 aa, Severe acute respiratory syndrome coronavirus 2
  REGION 1..14: note = Table B: HLA-DRB1*01:02L
HATREAVGTNLPLQ

SEQ ID NO: 19796 - protein, 14 aa, Severe acute respiratory syndrome coronavirus 2
  REGION 1..14: note = Table B: HLA-DRB1*01:02L
EAVGTNLPLQLGFS

SEQ ID NO: 19797 - protein, 14 aa, Severe acute respiratory syndrome coronavirus 2
  REGION 1..14: note = Table B: HLA-DRB1*01:02L HLA-DPA1*01:03-B1*03:01L
TNLPLQLGFSTGVN

SEQ ID NO: 19798 - protein, 14 aa, Severe acute respiratory syndrome coronavirus 2
  REGION 1..14: note = Table B: HLA-DRB1*01:02L HLA-DRB1*04:08L
LGFSTGVNLVAVPT

SEQ ID NO: 19799 - protein, 12 aa, Severe acute respiratory syndrome coronavirus 2
  REGION 1..12: note = Table B: HLA-DRB1*01:02L HLA-DQA1*01:01-B1*05:01L HLA-DRB1*08:03L
YVDTPNNTDFSR

SEQ ID NO: 19800 - protein, 13 aa, Severe acute respiratory syndrome coronavirus 2
  REGION 1..13: note = Table B: HLA-DRB1*01:02L HLA-DRB1*08:04L HLA-DRB1*04:10L HLA-DRB1*12:01L HLA-DPA1*02:01-B1*13:01L HLA-DRB1*04:08L
FSRVSAKPPPGDQ

SEQ ID NO: 19801 - protein, 14 aa, Severe acute respiratory syndrome coronavirus 2
  REGION 1..14: note = Table B: HLA-DRB1*01:02L
SRVSAKPPPGDQFK

SEQ ID NO: 19802 - protein, 16 aa, Severe acute respiratory syndrome coronavirus 2
  REGION 1..16: note = Table B: HLA-DRB1*01:02L
KPPPGDQFKHLIPLMY

SEQ ID NO: 19803 - protein, 11 aa, Severe acute respiratory syndrome coronavirus 2
  REGION 1..11: note = Table B: HLA-DRB1*01:02L HLA-DRB1*12:01L
QFKHLIPLMYK

SEQ ID NO: 19804 - protein, 12 aa, Severe acute respiratory syndrome coronavirus 2
  REGION 1..12: note = Table B: HLA-DRB1*01:02L HLA-DPA1*03:01-B1*04:02L HLA-DPA1*03:01-B1*105:01L
LIPLMYKGLPWN

SEQ ID NO: 19805 - protein, 13 aa, Severe acute respiratory syndrome coronavirus 2
  REGION 1..13: note = Table B: HLA-DRB1*01:02L
LSDTLKNLSDRVV

SEQ ID NO: 19806 - protein, 12 aa, Severe acute respiratory syndrome coronavirus 2
  REGION 1..12: note = Table B: HLA-DRB1*01:02L
AHGFELTSMKYF

SEQ ID NO: 19807 - protein, 15 aa, Severe acute respiratory syndrome coronavirus 2
  REGION 1..15: note = Table B: HLA-DRB1*01:02L
VKIGPERTCCLCDRR

SEQ ID NO: 19808 - protein, 14 aa, Severe acute respiratory syndrome coronavirus 2
  REGION 1..14: note = Table B: HLA-DRB1*01:02L HLA-DPA1*02:01-B1*13:01L HLA-DQA1*05:05-B1*03:01L
DRRATCFSTASDTY

SEQ ID NO: 19809 - protein, 14 aa, Severe acute respiratory syndrome coronavirus 2
  REGION 1..14: note = Table B: HLA-DRB1*01:02L
WHHSIGFDYVYNPF

SEQ ID NO: 19810 - protein, 12 aa, Severe acute respiratory syndrome coronavirus 2
  REGION 1..12: note = Table B: HLA-DRB1*01:02L HLA-DQA1*05:05-B1*03:19L HLA-DRB1*04:10L HLA-DQA1*05:05-B1*03:01L
YNPFMIDVQQWG

SEQ ID NO: 19811 - protein, 14 aa, Severe acute respiratory syndrome coronavirus 2
  REGION 1..14: note = Table B: HLA-DRB1*01:02L HLA-DPA1*03:01-B1*105:01L
HDLYCQVHGNAHVA

SEQ ID NO: 19812 - protein, 14 aa, Severe acute respiratory syndrome coronavirus 2
  REGION 1..14: note = Table B: HLA-DRB1*01:02L
DLYCQVHGNAHVAS

SEQ ID NO: 19813 - protein, 14 aa, Severe acute respiratory syndrome coronavirus 2
  REGION 1..14: note = Table B: HLA-DRB1*01:02L HLA-DRB1*08:01L HLA-DPA1*03:01-B1*105:01L
LAVHECFVKRVDWT

SEQ ID NO: 19814 - protein, 12 aa, Severe acute respiratory syndrome coronavirus 2
  REGION 1..12: note = Table B: HLA-DRB1*01:02L
TIEYPIIGDELK

SEQ ID NO: 19815 - protein, 13 aa, Severe acute respiratory syndrome coronavirus 2
  REGION 1..13: note = Table B: HLA-DRB1*01:02L HLA-DPA1*01:03-B1*03:01L
IEYPIIGDELKIN

SEQ ID NO: 19816 - protein, 13 aa, Severe acute respiratory syndrome coronavirus 2
  REGION 1..13: note = Table B: HLA-DRB1*01:02L
IGDELKINAACRK

SEQ ID NO: 19817 - protein, 12 aa, Severe acute respiratory syndrome coronavirus 2
  REGION 1..12: note = Table B: HLA-DRB1*01:02L HLA-DRB1*14:01L HLA-DRB1*12:01L HLA-DRB1*16:01L HLA-DRB1*15:03L
ELKINAACRKVQ

SEQ ID NO: 19818 - protein, 14 aa, Severe acute respiratory syndrome coronavirus 2
  REGION 1..14: note = Table B: HLA-DRB1*01:02L
RKVQHMVVKAALLA

SEQ ID NO: 19819 - protein, 14 aa, Severe acute respiratory syndrome coronavirus 2
  REGION 1..14: note = Table B: HLA-DRB1*01:02L HLA-DPA1*02:01-B1*13:01L
KVQHMVVKAALLAD

SEQ ID NO: 19820 - protein, 12 aa, Severe acute respiratory syndrome coronavirus 2
  REGION 1..12: note = Table B: HLA-DRB1*01:02L HLA-DRB1*08:01L
HMVVKAALLADK

SEQ ID NO: 19821 - protein, 12 aa, Severe acute respiratory syndrome coronavirus 2
  REGION 1..12: note = Table B: HLA-DRB1*01:02L HLA-DRB1*12:01L
ALLADKFPVLHD

SEQ ID NO: 19822 - protein, 13 aa, Severe acute respiratory syndrome coronavirus 2
  REGION 1..13: note = Table B: HLA-DRB1*01:02L
DKFPVLHDIGNPK

SEQ ID NO: 19823 - protein, 12 aa, Severe acute respiratory syndrome coronavirus 2
  REGION 1..12: note = Table B: HLA-DRB1*01:02L HLA-DRB1*04:08L
PVLHDIGNPKAI

SEQ ID NO: 19824 - protein, 13 aa, Severe acute respiratory syndrome coronavirus 2
  REGION 1..13: note = Table B: HLA-DRB1*01:02L
GNPKAIKCVPQAD

SEQ ID NO: 19825 - protein, 14 aa, Severe acute respiratory syndrome coronavirus 2
  REGION 1..14: note = Table B: HLA-DRB1*01:02L HLA-DPA1*02:01-B1*13:01L HLA-DRB1*15:03L
KAIKCVPQADVEWK

SEQ ID NO: 19826 - protein, 12 aa, Severe acute respiratory syndrome coronavirus 2
  REGION 1..12: note = Table B: HLA-DRB1*01:02L HLA-DQA1*01-B1*05L HLA-DRB1*16:01L HLA-DRB1*15:03L
VEWKFYDAQPCS

SEQ ID NO: 19827 - protein, 11 aa, Severe acute respiratory syndrome coronavirus 2
  REGION 1..11: note = Table B: HLA-DRB1*01:02L HLA-DQA1*01-B1*05L HLA-DRB1*16:01L HLA-DRB1*15:03L
WKFYDAQPCSD

SEQ ID NO: 19828 - protein, 11 aa, Severe acute respiratory syndrome coronavirus 2
  REGION 1..11: note = Table B: HLA-DRB1*01:02L HLA-DRB1*08:01L HLA-DRB1*12:01L HLA-DPA1*01:02-B1*04:01L
KFYDAQPCSDK

SEQ ID NO: 19829 - protein, 14 aa, Severe acute respiratory syndrome coronavirus 2
  REGION 1..14: note = Table B: HLA-DRB1*01:02L
YDAQPCSDKAYKIE

SEQ ID NO: 19830 - protein, 13 aa, Severe acute respiratory syndrome coronavirus 2
  REGION 1..13: note = Table B: HLA-DRB1*01:02L HLA-DRB1*08:04L HLA-DRB1*04:08L
KAYKIEELFYSYA

SEQ ID NO: 19831 - protein, 13 aa, Severe acute respiratory syndrome coronavirus 2
  REGION 1..13: note = Table B: HLA-DRB1*01:02L HLA-DRB1*08:04L HLA-DRB1*14:01L HLA-DQA1*05:01-B1*02:01L HLA-DQA1*03:01-B1*03:02L
LFWNCNVDRYPAN

SEQ ID NO: 19832 - protein, 14 aa, Severe acute respiratory syndrome coronavirus 2
  REGION 1..14: note = Table B: HLA-DRB1*01:02L
RYPANSIVCRFDTR

SEQ ID NO: 19833 - protein, 15 aa, Severe acute respiratory syndrome coronavirus 2
  REGION 1..15: note = Table B: HLA-DRB1*01:02L HLA-DRB1*14:01L HLA-DRB1*12:01L HLA-DRB1*16:01L
YPANSIVCRFDTRVL

SEQ ID NO: 19834 - protein, 12 aa, Severe acute respiratory syndrome coronavirus 2
  REGION 1..12: note = Table B: HLA-DRB1*01:02L HLA-DRB1*12:01L HLA-DPA1*02:01-B1*13:01L
IVCRFDTRVLSN

SEQ ID NO: 19835 - protein, 12 aa, Severe acute respiratory syndrome coronavirus 2
  REGION 1..12: note = Table B: HLA-DRB1*01:02L HLA-DRB1*16:01L
KHAFHTPAFDKS

SEQ ID NO: 19836 - protein, 12 aa, Severe acute respiratory syndrome coronavirus 2
  REGION 1..12: note = Table B: HLA-DRB1*01:02L HLA-DRB1*08:01L HLA-DRB1*12:01L HLA-DPA1*01:03-B1*02:01L
AFDKSAFVNLKQ

SEQ ID NO: 19837 - protein, 13 aa, Severe acute respiratory syndrome coronavirus 2
  REGION 1..13: note = Table B: HLA-DRB1*01:02L
VNLKQLPFFYYSD

SEQ ID NO: 19838 - protein, 14 aa, Severe acute respiratory syndrome coronavirus 2
  REGION 1..14: note = Table B: HLA-DRB1*01:02L
KQLPFFYYSDSPCE

SEQ ID NO: 19839 - protein, 16 aa, Severe acute respiratory syndrome coronavirus 2
  REGION 1..16: note = Table B: HLA-DRB1*01:02L
DSPCESHGKQVVSDID

SEQ ID NO: 19840 - protein, 11 aa, Severe acute respiratory syndrome coronavirus 2
  REGION 1..11: note = Table B: HLA-DRB1*01:02L HLA-DRB1*12:01L HLA-DRB1*16:01L HLA-DRB1*15:03L
IDYVPLKSATC

SEQ ID NO: 19841 - protein, 12 aa, Severe acute respiratory syndrome coronavirus 2
  REGION 1..12: note = Table B: HLA-DRB1*01:02L HLA-DPA1*02:01-B1*13:01L HLA-DPA1*03:01-B1*105:01L HLA-DRB1*04:08L
NEYRLYLDAYNM

SEQ ID NO: 19842 - protein, 12 aa, Severe acute respiratory syndrome coronavirus 2
  REGION 1..12: note = Table B: HLA-DRB1*01:02L HLA-DPA1*01:03-B1*04:02L
EYRLYLDAYNMM

SEQ ID NO: 19843 - protein, 14 aa, Severe acute respiratory syndrome coronavirus 2
  REGION 1..14: note = Table B: HLA-DRB1*01:02L HLA-DPA1*01:03-B1*03:01L HLA-DQA1*01-B1*05L HLA-DQA1*05:01-B1*02:01L HLA-DPA1*01:03-B1*04:01L HLA-DPA1*01:03-B1*04:02L HLA-DRB1*12:01L HLA-DRB1*16:01L
ISAGFSLWVYKQFD

SEQ ID NO: 19844 - protein, 12 aa, Severe acute respiratory syndrome coronavirus 2
  REGION 1..12: note = Table B: HLA-DRB1*01:02L HLA-DRB1*08:04L HLA-DRB1*08:01L HLA-DRB1*14:54L HLA-DQA1*05:05-B1*03:01L
NVAFNVVNKGHF

SEQ ID NO: 19845 - protein, 13 aa, Severe acute respiratory syndrome coronavirus 2
  REGION 1..13: note = Table B: HLA-DRB1*01:02L HLA-DPA1*03:01-B1*105:01L HLA-DRB1*15:03L
FNVVNKGHFDGQQ

SEQ ID NO: 19846 - protein, 16 aa, Severe acute respiratory syndrome coronavirus 2
  REGION 1..16: note = Table B: HLA-DRB1*01:02L HLA-DPA1*02:01-B1*13:01L
NVVNKGHFDGQQGEVP

SEQ ID NO: 19847 - protein, 14 aa, Severe acute respiratory syndrome coronavirus 2
  REGION 1..14: note = Table B: HLA-DRB1*01:02L HLA-DRB1*12:01L
TKVDGVDVELFENK

SEQ ID NO: 19848 - protein, 14 aa, Severe acute respiratory syndrome coronavirus 2
  REGION 1..14: note = Table B: HLA-DRB1*01:02L HLA-DRB1*08:04L HLA-DRB1*08:01L HLA-DRB1*04:10L HLA-DPA1*02:01-B1*13:01L HLA-DPA1*01:03-B1*02:01L
VDGVDVELFENKTT

SEQ ID NO: 19849 - protein, 13 aa, Severe acute respiratory syndrome coronavirus 2
  REGION 1..13: note = Table B: HLA-DRB1*01:02L HLA-DQA1*01:01-B1*05:01L
ENKTTLPVNVAFE

SEQ ID NO: 19850 - protein, 13 aa, Severe acute respiratory syndrome coronavirus 2
  REGION 1..13: note = Table B: HLA-DRB1*01:02L HLA-DQA1*03:01-B1*03:02L HLA-DPA1*01:02-B1*04:01L HLA-DRB1*04:08L HLA-DQA1*02:01-B1*03:03L
LPVNVAFELWAKR

SEQ ID NO: 19851 - protein, 11 aa, Severe acute respiratory syndrome coronavirus 2
  REGION 1..11: note = Table B: HLA-DRB1*01:02L HLA-DQA1*05:01-B1*02:01L HLA-DRB1*12:01L
NIKPVPEVKIL

SEQ ID NO: 19852 - protein, 14 aa, Severe acute respiratory syndrome coronavirus 2
  REGION 1..14: note = Table B: HLA-DRB1*01:02L HLA-DPA1*03:01-B1*105:01L HLA-DQA1*01:03-B1*06:01L
NLGVDIAANTVIWD

SEQ ID NO: 19853 - protein, 14 aa, Severe acute respiratory syndrome coronavirus 2
  REGION 1..14: note = Table B: HLA-DRB1*01:02L
AANTVIWDYKRDAP

SEQ ID NO: 19854 - protein, 14 aa, Severe acute respiratory syndrome coronavirus 2
  REGION 1..14: note = Table B: HLA-DRB1*01:02L
TIGVCSMTDIAKKP

SEQ ID NO: 19855 - protein, 14 aa, Severe acute respiratory syndrome coronavirus 2
  REGION 1..14: note = Table B: HLA-DRB1*01:02L
GRVDGQVDLFRNAR

SEQ ID NO: 19856 - protein, 12 aa, Severe acute respiratory syndrome coronavirus 2
  REGION 1..12: note = Table B: HLA-DRB1*01:02L
LFRNARNGVLIT

SEQ ID NO: 19857 - protein, 14 aa, Severe acute respiratory syndrome coronavirus 2
  REGION 1..14: note = Table B: HLA-DRB1*01:02L HLA-DPA1*01:03-B1*03:01L HLA-DPA1*02:01-B1*13:01L
RNARNGVLITEGSV

SEQ ID NO: 19858 - protein, 12 aa, Severe acute respiratory syndrome coronavirus 2
  REGION 1..12: note = Table B: HLA-DRB1*01:02L HLA-DRB1*04:08L
VLITEGSVKGLQ

SEQ ID NO: 19859 - protein, 12 aa, Severe acute respiratory syndrome coronavirus 2
  REGION 1..12: note = Table B: HLA-DRB1*01:02L HLA-DQA1*01:01-B1*05:01L HLA-DQA1*05:05-B1*03:19L HLA-DQA1*05:01-B1*02:01L HLA-DRB1*12:01L HLA-DPA1*03:01-B1*105:01L HLA-DRB1*14:17L
LNGVTLIGEAVK

SEQ ID NO: 19860 - protein, 12 aa, Severe acute respiratory syndrome coronavirus 2
  REGION 1..12: note = Table B: HLA-DRB1*01:02L HLA-DRB1*04:08L
EAVKTQFNYYKK

SEQ ID NO: 19861 - protein, 12 aa, Severe acute respiratory syndrome coronavirus 2
  REGION 1..12: note = Table B: HLA-DRB1*01:02L
KTQFNYYKKVDG

SEQ ID NO: 19862 - protein, 14 aa, Severe acute respiratory syndrome coronavirus 2
  REGION 1..14: note = Table B: HLA-DRB1*01:02L HLA-DRB1*11:04L HLA-DRB1*11:01L HLA-DRB1*12:01L
TYFTQSRNLQEFKP

SEQ ID NO: 19863 - protein, 14 aa, Severe acute respiratory syndrome coronavirus 2
  REGION 1..14: note = Table B: HLA-DRB1*01:02L HLA-DQA1*05:01-B1*02:01L HLA-DPA1*01:03-B1*04:02L HLA-DRB1*12:01L HLA-DPA1*02:01-B1*13:01L HLA-DRB1*16:01L HLA-DQA1*01:03-B1*06:01L
KPRSQMEIDFLELA

SEQ ID NO: 19864 - protein, 11 aa, Severe acute respiratory syndrome coronavirus 2
  REGION 1..11: note = Table B: HLA-DRB1*01:02L
LAMDEFIERYK

SEQ ID NO: 19865 - protein, 13 aa, Severe acute respiratory syndrome coronavirus 2
  REGION 1..13: note = Table B: HLA-DRB1*01:02L HLA-DRB1*08:01L HLA-DRB1*12:01L
KLEGYAFEHIVYG

SEQ ID NO: 19866 - protein, 12 aa, Severe acute respiratory syndrome coronavirus 2
  REGION 1..12: note = Table B: HLA-DRB1*01:02L HLA-DRB1*04:08L
GYAFEHIVYGDF

SEQ ID NO: 19867 - protein, 13 aa, Severe acute respiratory syndrome coronavirus 2
  REGION 1..13: note = Table B: HLA-DRB1*01:02L HLA-DRB1*08:01L
YAFEHIVYGDFSH

SEQ ID NO: 19868 - protein, 12 aa, Severe acute respiratory syndrome coronavirus 2
  REGION 1..12: note = Table B: HLA-DRB1*01:02L HLA-DRB1*12:01L HLA-DRB1*15:03L
GLHLLIGLAKRF

SEQ ID NO: 19869 - protein, 12 aa, Severe acute respiratory syndrome coronavirus 2
  REGION 1..12: note = Table B: HLA-DRB1*01:02L HLA-DRB1*15:03L
LHLLIGLAKRFK

SEQ ID NO: 19870 - protein, 14 aa, Severe acute respiratory syndrome coronavirus 2
  REGION 1..14: note = Table B: HLA-DRB1*01:02L HLA-DRB1*08:01L HLA-DRB1*16:01L HLA-DRB1*15:03L
HLLIGLAKRFKESP

SEQ ID NO: 19871 - protein, 12 aa, Severe acute respiratory syndrome coronavirus 2
  REGION 1..12: note = Table B: HLA-DRB1*01:02L HLA-DRB1*12:01L HLA-DRB1*15:03L
GLAKRFKESPFE

SEQ ID NO: 19872 - protein, 12 aa, Severe acute respiratory syndrome coronavirus 2
  REGION 1..12: note = Table B: HLA-DRB1*01:02L HLA-DPA1*01:03-B1*03:01L HLA-DPA1*03:01-B1*04:02L HLA-DPA1*01:03-B1*04:01L HLA-DRB1*04:10L HLA-DRB1*12:01L HLA-DPA1*02:01-B1*13:01L HLA-DRB1*08:03L HLA-DRB1*15:03L
LDDFVEIIKSQD

SEQ ID NO: 19873 - protein, 13 aa, Severe acute respiratory syndrome coronavirus 2
  REGION 1..13: note = Table B: HLA-DRB1*01:02L
QDLSVVSKVVKVT

SEQ ID NO: 19874 - protein, 14 aa, Severe acute respiratory syndrome coronavirus 2
  REGION 1..14: note = Table B: HLA-DRB1*01:02L HLA-DPA1*03:01-B1*105:01L
SVVSKVVKVTIDYT

SEQ ID NO: 19875 - protein, 14 aa, Severe acute respiratory syndrome coronavirus 2
  REGION 1..14: note = Table B: HLA-DRB1*01:02L
KDGHVETFYPKLQS

SEQ ID NO: 19876 - protein, 14 aa, Severe acute respiratory syndrome coronavirus 2
  REGION 1..14: note = Table B: HLA-DRB1*01:02L HLA-DRB1*08:01L HLA-DRB1*12:01L HLA-DRB1*04:08L
DGHVETFYPKLQSS

SEQ ID NO: 19877 - protein, 14 aa, Severe acute respiratory syndrome coronavirus 2
  REGION 1..14: note = Table B: HLA-DRB1*01:02L HLA-DRB1*15:03L
HVETFYPKLQSSQA

SEQ ID NO: 19878 - protein, 14 aa, Severe acute respiratory syndrome coronavirus 2
  REGION 1..14: note = Table B: HLA-DRB1*01:02L
QPGVAMPNLYKMQR

SEQ ID NO: 19879 - protein, 14 aa, Severe acute respiratory syndrome coronavirus 2
  REGION 1..14: note = Table B: HLA-DRB1*01:02L
KMQRMLLEKCDLQN

SEQ ID NO: 19880 - protein, 12 aa, Severe acute respiratory syndrome coronavirus 2
  REGION 1..12: note = Table B: HLA-DRB1*01:02L HLA-DRB3*02:01L HLA-DPA1*01:03-B1*03:01L HLA-DPA1*03:01-B1*04:02L HLA-DPA1*01:03-B1*04:01L HLA-DQA1*05:05-B1*03:116L HLA-DPA1*01:03-B1*04:02L HLA-DPA1*02:01-B1*13:01L
  REGION 1..12: note = CONT. FROM ABOVE: HLA-DRB1*15:03L
YGDSATLPKGIM

SEQ ID NO: 19881 - protein, 15 aa, Severe acute respiratory syndrome coronavirus 2
  REGION 1..15: note = Table B: HLA-DRB1*01:02L
DSATLPKGIMMNVAK

SEQ ID NO: 19882 - protein, 14 aa, Severe acute respiratory syndrome coronavirus 2
  REGION 1..14: note = Table B: HLA-DRB1*01:02L HLA-DPA1*01:03-B1*04:02L HLA-DRB1*15:03L
AKYTQLCQYLNTLT

SEQ ID NO: 19883 - protein, 14 aa, Severe acute respiratory syndrome coronavirus 2
  REGION 1..14: note = Table B: HLA-DRB1*01:02L HLA-DRB1*12:01L HLA-DRB1*16:01L HLA-DRB1*15:03L
TLTLAVPYNMRVIH

SEQ ID NO: 19884 - protein, 14 aa, Severe acute respiratory syndrome coronavirus 2
  REGION 1..14: note = Table B: HLA-DRB1*01:02L HLA-DQA1*05:05-B1*03:116L HLA-DRB1*04:08L
GAGSDKGVAPGTAV

SEQ ID NO: 19885 - protein, 15 aa, Severe acute respiratory syndrome coronavirus 2
  REGION 1..15: note = Table B: HLA-DRB1*01:02L
APGTAVLRQWLPTGT

SEQ ID NO: 19886 - protein, 14 aa, Severe acute respiratory syndrome coronavirus 2
  REGION 1..14: note = Table B: HLA-DRB1*01:02L HLA-DRB1*14:01L HLA-DQA1*05:05-B1*03:19L HLA-DPA1*03:01-B1*105:01L HLA-DRB1*15:03L
DSTLIGDCATVHTA

SEQ ID NO: 19887 - protein, 14 aa, Severe acute respiratory syndrome coronavirus 2
  REGION 1..14: note = Table B: HLA-DRB1*01:02L HLA-DRB1*04:08L
TLIGDCATVHTANK

SEQ ID NO: 19888 - protein, 14 aa, Severe acute respiratory syndrome coronavirus 2
  REGION 1..14: note = Table B: HLA-DRB1*01:02L
IGDCATVHTANKWD

SEQ ID NO: 19889 - protein, 15 aa, Severe acute respiratory syndrome coronavirus 2
  REGION 1..15: note = Table B: HLA-DRB1*01:02L
ATVHTANKWDLIISD

SEQ ID NO: 19890 - protein, 14 aa, Severe acute respiratory syndrome coronavirus 2
  REGION 1..14: note = Table B: HLA-DRB1*01:02L HLA-DRB1*12:01L HLA-DRB1*04:08L HLA-DRB1*15:03L
NKWDLIISDMYDPK

SEQ ID NO: 19891 - protein, 12 aa, Severe acute respiratory syndrome coronavirus 2
  REGION 1..12: note = Table B: HLA-DRB1*01:02L HLA-DRB1*15:03L
FFTYICGFIQQK

SEQ ID NO: 19892 - protein, 13 aa, Severe acute respiratory syndrome coronavirus 2
  REGION 1..13: note = Table B: HLA-DRB1*01:02L HLA-DQA1*05:05-B1*03:01L
FTYICGFIQQKLA

SEQ ID NO: 19893 - protein, 13 aa, Severe acute respiratory syndrome coronavirus 2
  REGION 1..13: note = Table B: HLA-DRB1*01:02L HLA-DPA1*01:03-B1*03:01L HLA-DRB1*12:01L
FIQQKLALGGSVA

SEQ ID NO: 19894 - protein, 13 aa, Severe acute respiratory syndrome coronavirus 2
  REGION 1..13: note = Table B: HLA-DRB1*01:02L HLA-DRB1*08:04L HLA-DRB1*08:01L HLA-DRB1*04:08L
VAIKITEHSWNAD

SEQ ID NO: 19895 - protein, 13 aa, Severe acute respiratory syndrome coronavirus 2
  REGION 1..13: note = Table B: HLA-DRB1*01:02L
IKITEHSWNADLY

SEQ ID NO: 19896 - protein, 14 aa, Severe acute respiratory syndrome coronavirus 2
  REGION 1..14: note = Table B: HLA-DRB1*01:02L
HSWNADLYKLMGHF

SEQ ID NO: 19897 - protein, 12 aa, Severe acute respiratory syndrome coronavirus 2
  REGION 1..12: note = Table B: HLA-DRB1*01:02L HLA-DRB1*14:01L
ADLYKLMGHFAW

SEQ ID NO: 19898 - protein, 13 aa, Severe acute respiratory syndrome coronavirus 2
  REGION 1..13: note = Table B: HLA-DRB1*01:02L
DLYKLMGHFAWWT

SEQ ID NO: 19899 - protein, 14 aa, Severe acute respiratory syndrome coronavirus 2
  REGION 1..14: note = Table B: HLA-DRB1*01:02L HLA-DRB1*15:03L
AWWTAFVTNVNASS

SEQ ID NO: 19900 - protein, 13 aa, Severe acute respiratory syndrome coronavirus 2
  REGION 1..13: note = Table B: HLA-DRB1*01:02L HLA-DPA1*01:03-B1*03:01L
NVNASSSEAFLIG

SEQ ID NO: 19901 - protein, 14 aa, Severe acute respiratory syndrome coronavirus 2
  REGION 1..14: note = Table B: HLA-DRB1*01:02L HLA-DPA1*02:01-B1*13:01L HLA-DRB1*16:01L
KPREQIDGYVMHAN

SEQ ID NO: 19902 - protein, 14 aa, Severe acute respiratory syndrome coronavirus 2
  REGION 1..14: note = Table B: HLA-DRB1*01:02L HLA-DPA1*03:01-B1*04:02L HLA-DPA1*02:01-B1*13:01L HLA-DRB1*16:01L HLA-DRB1*15:03L
PIQLSSYSLFDMSK

SEQ ID NO: 19903 - protein, 13 aa, Severe acute respiratory syndrome coronavirus 2
  REGION 1..13: note = Table B: HLA-DRB1*01:02L HLA-DRB1*12:01L
LSSYSLFDMSKFP

SEQ ID NO: 19904 - protein, 12 aa, Severe acute respiratory syndrome coronavirus 2
  REGION 1..12: note = Table B: HLA-DRB1*01:02L
FDMSKFPLKLRG

SEQ ID NO: 19905 - protein, 12 aa, Severe acute respiratory syndrome coronavirus 2
  REGION 1..12: note = Table B: HLA-DRB1*01:02L
KLRGTAVMSLKE

SEQ ID NO: 19906 - protein, 12 aa, Severe acute respiratory syndrome coronavirus 2
  REGION 1..12: note = Table B: HLA-DRB1*01:02L
LSLLSKGRLIIR

SEQ ID NO: 19907 - protein, 13 aa, Severe acute respiratory syndrome coronavirus 2
  REGION 1..13: note = Table B: HLA-DRB1*01:02L HLA-DRB1*08:01L
LSKGRLIIRENNR

SEQ ID NO: 19908 - protein, 12 aa, Severe acute respiratory syndrome coronavirus 2
  REGION 1..12: note = Table B: HLA-DRB1*01:02L HLA-DRB1*12:01L HLA-DRB1*15:03L
RLIIRENNRVVI

SEQ ID NO: 19909 - protein, 11 aa, Severe acute respiratory syndrome coronavirus 2
  REGION 1..11: note = Table B: HLA-DRB1*01:02L
LLPLVSSQCVN

SEQ ID NO: 19910 - protein, 15 aa, Severe acute respiratory syndrome coronavirus 2
  REGION 1..15: note = Table B: HLA-DRB1*01:02L
RTQLPPAYTNSFTRG

SEQ ID NO: 19911 - protein, 15 aa, Severe acute respiratory syndrome coronavirus 2
  REGION 1..15: note = Table B: HLA-DRB1*01:02L
PAYTNSFTRGVYYPD

SEQ ID NO: 19912 - protein, 12 aa, Severe acute respiratory syndrome coronavirus 2
  REGION 1..12: note = Table B: HLA-DRB1*01:02L HLA-DPA1*03:01-B1*04:02L HLA-DRB1*08:01L HLA-DPA1*01:03-B1*04:02L HLA-DRB1*12:01L HLA-DQA1*03:01-B1*03:02L HLA-DRB1*16:01L HLA-DRB1*15:03L
KVFRSSVLHSTQ

SEQ ID NO: 19913 - protein, 13 aa, Severe acute respiratory syndrome coronavirus 2
  REGION 1..13: note = Table B: HLA-DRB1*01:02L
SVLHSTQDLFLPF

SEQ ID NO: 19914 - protein, 12 aa, Severe acute respiratory syndrome coronavirus 2
  REGION 1..12: note = Table B: HLA-DRB1*01:02L HLA-DRB1*12:01L HLA-DQA1*02:01-B1*03:03L
SNVTWFHAIHVS

SEQ ID NO: 19915 - protein, 12 aa, Severe acute respiratory syndrome coronavirus 2
  REGION 1..12: note = Table B: HLA-DRB1*01:02L HLA-DRB1*04:08L
WFHAIHVSGTNG

SEQ ID NO: 19916 - protein, 16 aa, Severe acute respiratory syndrome coronavirus 2
  REGION 1..16: note = Table B: HLA-DRB1*01:02L HLA-DQA1*01:03-B1*06:01L
IHVSGTNGTKRFDNPV

SEQ ID NO: 19917 - protein, 12 aa, Severe acute respiratory syndrome coronavirus 2
  REGION 1..12: note = Table B: HLA-DRB1*01:02L HLA-DPA1*02:01-B1*13:01L HLA-DRB1*04:08L
RFDNPVLPFNDG

SEQ ID NO: 19918 - protein, 11 aa, Severe acute respiratory syndrome coronavirus 2
  REGION 1..11: note = Table B: HLA-DRB1*01:02L HLA-DQA1*05:05-B1*03:116L
PVLPFNDGVYF

SEQ ID NO: 19919 - protein, 13 aa, Severe acute respiratory syndrome coronavirus 2
  REGION 1..13: note = Table B: HLA-DRB1*01:02L
RGWIFGTTLDSKT

SEQ ID NO: 19920 - protein, 13 aa, Severe acute respiratory syndrome coronavirus 2
  REGION 1..13: note = Table B: HLA-DRB1*01:02L HLA-DPA1*02:01-B1*13:01L HLA-DRB1*04:08L HLA-DQA1*02:01-B1*03:03L
HKNNKSWMESEFR

SEQ ID NO: 19921 - protein, 13 aa, Severe acute respiratory syndrome coronavirus 2
  REGION 1..13: note = Table B: HLA-DRB1*01:02L HLA-DRB1*14:01L HLA-DRB1*08:01L
NNKSWMESEFRVY

SEQ ID NO: 19922 - protein, 13 aa, Severe acute respiratory syndrome coronavirus 2
  REGION 1..13: note = Table B: HLA-DRB1*01:02L HLA-DPA1*01:03-B1*02:01L
NKSWMESEFRVYS

SEQ ID NO: 19923 - protein, 14 aa, Severe acute respiratory syndrome coronavirus 2
  REGION 1..14: note = Table B: HLA-DRB1*01:02L HLA-DRB1*08:04L HLA-DRB1*08:01L HLA-DPA1*01:03-B1*02:01L HLA-DQA1*05:05-B1*03:01L
SWMESEFRVYSSAN

SEQ ID NO: 19924 - protein, 12 aa, Severe acute respiratory syndrome coronavirus 2
  REGION 1..12: note = Table B: HLA-DRB1*01:02L HLA-DPA1*01:03-B1*03:01L
TFEYVSQPFLMD

SEQ ID NO: 19925 - protein, 11 aa, Severe acute respiratory syndrome coronavirus 2
  REGION 1..11: note = Table B: HLA-DRB1*01:02L
NFKNLREFVFK

SEQ ID NO: 19926 - protein, 13 aa, Severe acute respiratory syndrome coronavirus 2
  REGION 1..13: note = Table B: HLA-DRB1*01:02L HLA-DRB1*14:01L
NLREFVFKNIDGY

SEQ ID NO: 19927 - protein, 13 aa, Severe acute respiratory syndrome coronavirus 2
  REGION 1..13: note = Table B: HLA-DRB1*01:02L HLA-DRB1*14:01L HLA-DRB1*11:04L HLA-DRB1*08:01L HLA-DRB3*01:01L
KNIDGYFKIYSKH

SEQ ID NO: 19928 - protein, 12 aa, Severe acute respiratory syndrome coronavirus 2
  REGION 1..12: note = Table B: HLA-DRB1*01:02L HLA-DRB1*08:04L HLA-DRB1*08:77L HLA-DRB3*02:01L HLA-DRB1*03:01L HLA-DRB1*12:02L
INLVRDLPQGFS

SEQ ID NO: 19929 - protein, 11 aa, Severe acute respiratory syndrome coronavirus 2
  REGION 1..11: note = Table B: HLA-DRB1*01:02L
RFQTLLALHRS

SEQ ID NO: 19930 - protein, 12 aa, Severe acute respiratory syndrome coronavirus 2
  REGION 1..12: note = Table B: HLA-DRB1*01:02L HLA-DRB1*08:04L HLA-DRB1*12:01L HLA-DRB1*15:03L
FQTLLALHRSYL

SEQ ID NO: 19931 - protein, 14 aa, Severe acute respiratory syndrome coronavirus 2
  REGION 1..14: note = Table B: HLA-DRB1*01:02L HLA-DRB1*04:08L
RSYLTPGDSSSGWT

SEQ ID NO: 19932 - protein, 14 aa, Severe acute respiratory syndrome coronavirus 2
  REGION 1..14: note = Table B: HLA-DRB1*01:02L HLA-DRB1*12:01L HLA-DPA1*03:01-B1*105:01L HLA-DRB1*04:08L HLA-DRB1*15:03L
YLQPRTFLLKYNEN

SEQ ID NO: 19933 - protein, 14 aa, Severe acute respiratory syndrome coronavirus 2
  REGION 1..14: note = Table B: HLA-DRB1*01:02L HLA-DPA1*02:01-B1*13:01L
LQPRTFLLKYNENG

SEQ ID NO: 19934 - protein, 14 aa, Severe acute respiratory syndrome coronavirus 2
  REGION 1..14: note = Table B: HLA-DRB1*01:02L
QPRTFLLKYNENGT

SEQ ID NO: 19935 - protein, 15 aa, Severe acute respiratory syndrome coronavirus 2
  REGION 1..15: note = Table B: HLA-DRB1*01:02L
DCALDPLSETKCTLK

SEQ ID NO: 19936 - protein, 14 aa, Severe acute respiratory syndrome coronavirus 2
  REGION 1..14: note = Table B: HLA-DRB1*01:02L
ALDPLSETKCTLKS

SEQ ID NO: 19937 - protein, 14 aa, Severe acute respiratory syndrome coronavirus 2
  REGION 1..14: note = Table B: HLA-DRB1*01:02L HLA-DRB1*15:03L
TNLCPFGEVFNATR

SEQ ID NO: 19938 - protein, 11 aa, Severe acute respiratory syndrome coronavirus 2
  REGION 1..11: note = Table B: HLA-DRB1*01:02L HLA-DRB1*08:04L HLA-DRB1*14:01L HLA-DRB1*11:04L HLA-DRB1*08:01L HLA-DRB1*11:01L HLA-DPA1*01:03-B1*02:01L
FNATRFASVYA

SEQ ID NO: 19939 - protein, 11 aa, Severe acute respiratory syndrome coronavirus 2
  REGION 1..11: note = Table B: HLA-DRB1*01:02L HLA-DRB1*08:01L HLA-DPA1*01:02-B1*04:01L HLA-DRB1*16:01L HLA-DRB1*04:08L HLA-DQA1*02:01-B1*03:03L
FASVYAWNRKR

SEQ ID NO: 19940 - protein, 12 aa, Severe acute respiratory syndrome coronavirus 2
  REGION 1..12: note = Table B: HLA-DRB1*01:02L HLA-DPA1*02:01-B1*13:01L
RKRISNCVADYS

SEQ ID NO: 19941 - protein, 13 aa, Severe acute respiratory syndrome coronavirus 2
  REGION 1..13: note = Table B: HLA-DRB1*01:02L
YADSFVIRGDEVR

SEQ ID NO: 19942 - protein, 14 aa, Severe acute respiratory syndrome coronavirus 2
  REGION 1..14: note = Table B: HLA-DRB1*01:02L HLA-DRB1*15:03L
AWNSNNLDSKVGGN

SEQ ID NO: 19943 - protein, 11 aa, Severe acute respiratory syndrome coronavirus 2
  REGION 1..11: note = Table B: HLA-DRB1*01:02L HLA-DQA1*01:01-B1*05:01L
NLDSKVGGNYN

SEQ ID NO: 19944 - protein, 12 aa, Severe acute respiratory syndrome coronavirus 2
  REGION 1..12: note = Table B: HLA-DRB1*01:02L HLA-DRB1*14:01L HLA-DRB1*08:01L HLA-DRB1*12:01L HLA-DRB1*16:01L HLA-DRB1*04:08L HLA-DRB1*15:03L
YRLFRKSNLKPF

SEQ ID NO: 19945 - protein, 12 aa, Severe acute respiratory syndrome coronavirus 2
  REGION 1..12: note = Table B: HLA-DRB1*01:02L HLA-DRB1*14:01L HLA-DRB1*08:01L HLA-DRB1*12:01L HLA-DPA1*01:02-B1*04:01L HLA-DRB1*16:01L HLA-DRB1*04:08L HLA-DRB1*15:03L
RLFRKSNLKPFE

SEQ ID NO: 19946 - protein, 14 aa, Severe acute respiratory syndrome coronavirus 2
  REGION 1..14: note = Table B: HLA-DRB1*01:02L HLA-DPA1*02:01-B1*13:01L
FRKSNLKPFERDIS

SEQ ID NO: 19947 - protein, 14 aa, Severe acute respiratory syndrome coronavirus 2
  REGION 1..14: note = Table B: HLA-DRB1*01:02L HLA-DPA1*01:03-B1*03:01L HLA-DRB1*08:01L
IYQAGSTPCNGVEG

SEQ ID NO: 19948 - protein, 14 aa, Severe acute respiratory syndrome coronavirus 2
  REGION 1..14: note = Table B: HLA-DRB1*01:02L
FNCYFPLQSYGFQP

SEQ ID NO: 19949 - protein, 12 aa, Severe acute respiratory syndrome coronavirus 2
  REGION 1..12: note = Table B: HLA-DRB1*01:02L HLA-DRB3*02:01L
SYGFQPTNGVGY

SEQ ID NO: 19950 - protein, 12 aa, Severe acute respiratory syndrome coronavirus 2
  REGION 1..12: note = Table B: HLA-DRB1*01:02L HLA-DRB1*07:01L
GFQPTNGVGYQP

SEQ ID NO: 19951 - protein, 15 aa, Severe acute respiratory syndrome coronavirus 2
  REGION 1..15: note = Table B: HLA-DRB1*01:02L HLA-DPA1*03:01-B1*04:02L HLA-DRB1*04:08L
QPTNGVGYQPYRVVV

SEQ ID NO: 19952 - protein, 11 aa, Severe acute respiratory syndrome coronavirus 2
  REGION 1..11: note = Table B: HLA-DRB1*01:02L HLA-DRB3*02:01L HLA-DRB1*14:01L HLA-DPA1*01:03-B1*04:01L HLA-DRB1*12:01L
VGYQPYRVVVL

SEQ ID NO: 19953 - protein, 14 aa, Severe acute respiratory syndrome coronavirus 2
  REGION 1..14: note = Table B: HLA-DRB1*01:02L
HAPATVCGPKKSTN

SEQ ID NO: 19954 - protein, 11 aa, Severe acute respiratory syndrome coronavirus 2
  REGION 1..11: note = Table B: HLA-DRB1*01:02L
NFNGLTGTGVL

SEQ ID NO: 19955 - protein, 11 aa, Severe acute respiratory syndrome coronavirus 2
  REGION 1..11: note = Table B: HLA-DRB1*01:02L
FNGLTGTGVLT

SEQ ID NO: 19956 - protein, 12 aa, Severe acute respiratory syndrome coronavirus 2
  REGION 1..12: note = Table B: HLA-DRB1*01:02L
GTGVLTESNKKF

SEQ ID NO: 19957 - protein, 14 aa, Severe acute respiratory syndrome coronavirus 2
  REGION 1..14: note = Table B: HLA-DRB1*01:02L HLA-DRB1*15:03L
GRDIADTTDAVRDP

SEQ ID NO: 19958 - protein, 14 aa, Severe acute respiratory syndrome coronavirus 2
  REGION 1..14: note = Table B: HLA-DRB1*01:02L
GGVSVITPGTNTSN

SEQ ID NO: 19959 - protein, 16 aa, Severe acute respiratory syndrome coronavirus 2
  REGION 1..16: note = Table B: HLA-DRB1*01:02L
TPGTNTSNQVAVLYQD

SEQ ID NO: 19960 - protein, 13 aa, Severe acute respiratory syndrome coronavirus 2
  REGION 1..13: note = Table B: HLA-DRB1*01:02L
QDVNCTEVPVAIH

SEQ ID NO: 19961 - protein, 14 aa, Severe acute respiratory syndrome coronavirus 2
  REGION 1..14: note = Table B: HLA-DRB1*01:02L
DVNCTEVPVAIHAD

SEQ ID NO: 19962 - protein, 12 aa, Severe acute respiratory syndrome coronavirus 2
  REGION 1..12: note = Table B: HLA-DRB1*01:02L
AIHADQLTPTWR

SEQ ID NO: 19963 - protein, 14 aa, Severe acute respiratory syndrome coronavirus 2
  REGION 1..14: note = Table B: HLA-DRB1*01:02L
NVFQTRAGCLIGAE

SEQ ID NO: 19964 - protein, 14 aa, Severe acute respiratory syndrome coronavirus 2
  REGION 1..14: note = Table B: HLA-DRB1*01:02L HLA-DQA1*05:05-B1*03:19L HLA-DPA1*02:01-B1*13:01L
QTRAGCLIGAEHVN

SEQ ID NO: 19965 - protein, 16 aa, Severe acute respiratory syndrome coronavirus 2
  REGION 1..16: note = Table B: HLA-DRB1*01:02L
IPIGAGICASYQTQTN

SEQ ID NO: 19966 - protein, 11 aa, Severe acute respiratory syndrome coronavirus 2
  REGION 1..11: note = Table B: HLA-DRB1*01:02L
SYQTQTNSPRR

SEQ ID NO: 19967 - protein, 11 aa, Severe acute respiratory syndrome coronavirus 2
  REGION 1..11: note = Table B: HLA-DRB1*01:02L HLA-DRB1*04:08L
YQTQTNSPRRA

SEQ ID NO: 19968 - protein, 13 aa, Severe acute respiratory syndrome coronavirus 2
  REGION 1..13: note = Table B: HLA-DRB1*01:02L
NSPRRARSVASQS

SEQ ID NO: 19969 - protein, 13 aa, Severe acute respiratory syndrome coronavirus 2
  REGION 1..13: note = Table B: HLA-DRB1*01:02L HLA-DPA1*02:01-B1*13:01L
SPRRARSVASQSI

SEQ ID NO: 19970 - protein, 12 aa, Severe acute respiratory syndrome coronavirus 2
  REGION 1..12: note = Table B: HLA-DRB1*01:02L
RSVASQSIIAYT

SEQ ID NO: 19971 - protein, 13 aa, Severe acute respiratory syndrome coronavirus 2
  REGION 1..13: note = Table B: HLA-DRB1*01:02L HLA-DQA1*05:01-B1*02:01L HLA-DRB1*12:01L HLA-DPA1*03:01-B1*105:01L HLA-DRB1*10:01L HLA-DRB1*16:01L HLA-DRB1*15:03L
IAYTMSLGAENSV

SEQ ID NO: 19972 - protein, 15 aa, Severe acute respiratory syndrome coronavirus 2
  REGION 1..15: note = Table B: HLA-DRB1*01:02L
TMSLGAENSVAYSNN

SEQ ID NO: 19973 - protein, 14 aa, Severe acute respiratory syndrome coronavirus 2
  REGION 1..14: note = Table B: HLA-DRB1*01:02L
AYSNNSIAIPTNFT

SEQ ID NO: 19974 - protein, 12 aa, Severe acute respiratory syndrome coronavirus 2
  REGION 1..12: note = Table B: HLA-DRB1*01:02L HLA-DPA1*03:01-B1*105:01L HLA-DRB1*16:01L HLA-DRB1*15:03L
NLLLQYGSFCTQ

SEQ ID NO: 19975 - protein, 13 aa, Severe acute respiratory syndrome coronavirus 2
  REGION 1..13: note = Table B: HLA-DRB1*01:02L HLA-DRB1*08:04L HLA-DRB1*14:01L HLA-DRB1*08:01L
GSFCTQLNRALTG

SEQ ID NO: 19976 - protein, 12 aa, Severe acute respiratory syndrome coronavirus 2
  REGION 1..12: note = Table B: HLA-DRB1*01:02L HLA-DPA1*01:03-B1*03:01L HLA-DPA1*01:03-B1*04:02L HLA-DPA1*02:01-B1*13:01L HLA-DRB1*15:03L
ALTGIAVEQDKN

SEQ ID NO: 19977 - protein, 15 aa, Severe acute respiratory syndrome coronavirus 2
  REGION 1..15: note = Table B: HLA-DRB1*01:02L HLA-DQA1*01:01-B1*05:01L HLA-DRB1*04:08L
VEQDKNTQEVFAQVK

SEQ ID NO: 19978 - protein, 13 aa, Severe acute respiratory syndrome coronavirus 2
  REGION 1..13: note = Table B: HLA-DRB1*01:02L HLA-DPA1*02:01-B1*13:01L
DKNTQEVFAQVKQ

SEQ ID NO: 19979 - protein, 14 aa, Severe acute respiratory syndrome coronavirus 2
  REGION 1..14: note = Table B: HLA-DRB1*01:02L HLA-DPA1*02:01-B1*13:01L HLA-DRB1*16:01L HLA-DRB1*15:03L
KPSKRSFIEDLLFN

SEQ ID NO: 19980 - protein, 14 aa, Severe acute respiratory syndrome coronavirus 2
  REGION 1..14: note = Table B: HLA-DRB1*01:02L HLA-DRB1*15:03L
PSKRSFIEDLLFNK

SEQ ID NO: 19981 - protein, 13 aa, Severe acute respiratory syndrome coronavirus 2
  REGION 1..13: note = Table B: HLA-DRB1*01:02L HLA-DRB1*04:08L
KQYGDCLGDIAAR

SEQ ID NO: 19982 - protein, 14 aa, Severe acute respiratory syndrome coronavirus 2
  REGION 1..14: note = Table B: HLA-DRB1*01:02L
AARDLICAQKFNGL

SEQ ID NO: 19983 - protein, 15 aa, Severe acute respiratory syndrome coronavirus 2
  REGION 1..15: note = Table B: HLA-DRB1*01:02L HLA-DQA1*05:05-B1*03:01L
AQKFNGLTVLPPLLT

SEQ ID NO: 19984 - protein, 14 aa, Severe acute respiratory syndrome coronavirus 2
  REGION 1..14: note = Table B: HLA-DRB1*01:02L HLA-DRB1*12:01L HLA-DQA1*05:05-B1*03:01L HLA-DRB1*15:03L
FNGLTVLPPLLTDE

SEQ ID NO: 19985 - protein, 14 aa, Severe acute respiratory syndrome coronavirus 2
  REGION 1..14: note = Table B: HLA-DRB1*01:02L HLA-DQA1*05:05-B1*03:01L
NGLTVLPPLLTDEM

SEQ ID NO: 19986 - protein, 13 aa, Severe acute respiratory syndrome coronavirus 2
  REGION 1..13: note = Table B: HLA-DRB1*01:02L HLA-DRB1*15:01L
DEMIAQYTSALLA

SEQ ID NO: 19987 - protein, 14 aa, Severe acute respiratory syndrome coronavirus 2
  REGION 1..14: note = Table B: HLA-DRB1*01:02L HLA-DPA1*01:03-B1*03:01L HLA-DPA1*01:03-B1*04:02L HLA-DRB1*04:08L
TSALLAGTITSGWT

SEQ ID NO: 19988 - protein, 14 aa, Severe acute respiratory syndrome coronavirus 2
  REGION 1..14: note = Table B: HLA-DRB1*01:02L HLA-DPA1*01:03-B1*03:01L HLA-DRB1*12:01L HLA-DPA1*03:01-B1*105:01L HLA-DRB1*16:01L HLA-DRB1*15:03L
ITSGWTFGAGAALQ

SEQ ID NO: 19989 - protein, 14 aa, Severe acute respiratory syndrome coronavirus 2
  REGION 1..14: note = Table B: HLA-DRB1*01:02L HLA-DRB1*15:03L
SGWTFGAGAALQIP

SEQ ID NO: 19990 - protein, 14 aa, Severe acute respiratory syndrome coronavirus 2
  REGION 1..14: note = Table B: HLA-DRB1*01:02L
GWTFGAGAALQIPF

SEQ ID NO: 19991 - protein, 14 aa, Severe acute respiratory syndrome coronavirus 2
  REGION 1..14: note = Table B: HLA-DRB1*01:02L HLA-DPA1*03:01-B1*105:01L
AALQIPFAMQMAYR

SEQ ID NO: 19992 - protein, 12 aa, Severe acute respiratory syndrome coronavirus 2
  REGION 1..12: note = Table B: HLA-DRB1*01:02L HLA-DRB1*14:54L
FNGIGVTQNVLY

SEQ ID NO: 19993 - protein, 13 aa, Severe acute respiratory syndrome coronavirus 2
  REGION 1..13: note = Table B: HLA-DRB1*01:02L
VTQNVLYENQKLI

SEQ ID NO: 19994 - protein, 12 aa, Severe acute respiratory syndrome coronavirus 2
  REGION 1..12: note = Table B: HLA-DRB1*01:02L HLA-DRB1*11:04L HLA-DQA1*05:01-B1*02:01L HLA-DRB1*12:01L HLA-DQA1*05:05-B1*03:01L HLA-DRB1*10:01L HLA-DRB1*15:03L
AIGKIQDSLSST

SEQ ID NO: 19995 - protein, 12 aa, Severe acute respiratory syndrome coronavirus 2
  REGION 1..12: note = Table B: HLA-DRB1*01:02L
SLSSTASALGKL

SEQ ID NO: 19996 - protein, 14 aa, Severe acute respiratory syndrome coronavirus 2
  REGION 1..14: note = Table B: HLA-DRB1*01:02L HLA-DRB1*12:01L HLA-DRB1*04:08L HLA-DRB1*15:03L
LSRLDKVEAEVQID

SEQ ID NO: 19997 - protein, 14 aa, Severe acute respiratory syndrome coronavirus 2
  REGION 1..14: note = Table B: HLA-DRB1*01:02L
KVEAEVQIDRLITG

SEQ ID NO: 19998 - protein, 14 aa, Severe acute respiratory syndrome coronavirus 2
  REGION 1..14: note = Table B: HLA-DRB1*01:02L HLA-DRB1*04:08L
VEAEVQIDRLITGR

SEQ ID NO: 19999 - protein, 13 aa, Severe acute respiratory syndrome coronavirus 2
  REGION 1..13: note = Table B: HLA-DRB1*01:02L HLA-DRB1*14:01L HLA-DQA1*03:01-B1*03:02L HLA-DRB1*15:03L
ITGRLQSLQTYVT

SEQ ID NO: 20000 - protein, 12 aa, Severe acute respiratory syndrome coronavirus 2
  REGION 1..12: note = Table B: HLA-DRB1*01:02L HLA-DRB1*12:01L
LQSLQTYVTQQL

SEQ ID NO: 20001 - protein, 11 aa, Severe acute respiratory syndrome coronavirus 2
  REGION 1..11: note = Table B: HLA-DRB1*01:02L
LIRAAEIRASA

SEQ ID NO: 20002 - protein, 14 aa, Severe acute respiratory syndrome coronavirus 2
  REGION 1..14: note = Table B: HLA-DRB1*01:02L HLA-DPA1*01:03-B1*02:01L HLA-DRB1*15:03L
SANLAATKMSECVL

SEQ ID NO: 20003 - protein, 14 aa, Severe acute respiratory syndrome coronavirus 2
  REGION 1..14: note = Table B: HLA-DRB1*01:02L HLA-DPA1*01:03-B1*02:01L HLA-DRB1*04:08L HLA-DRB1*15:03L
ANLAATKMSECVLG

SEQ ID NO: 20004 - protein, 14 aa, Severe acute respiratory syndrome coronavirus 2
  REGION 1..14: note = Table B: HLA-DRB1*01:02L
KMSECVLGQSKRVD

SEQ ID NO: 20005 - protein, 13 aa, Severe acute respiratory syndrome coronavirus 2
  REGION 1..13: note = Table B: HLA-DRB1*01:02L
VFLHVTYVPAQEK

SEQ ID NO: 20006 - protein, 12 aa, Severe acute respiratory syndrome coronavirus 2
  REGION 1..12: note = Table B: HLA-DRB1*01:02L HLA-DRB1*04:08L
FTTAPAICHDGK

SEQ ID NO: 20007 - protein, 14 aa, Severe acute respiratory syndrome coronavirus 2
  REGION 1..14: note = Table B: HLA-DRB1*01:02L
TAPAICHDGKAHFP

SEQ ID NO: 20008 - protein, 15 aa, Severe acute respiratory syndrome coronavirus 2
  REGION 1..15: note = Table B: HLA-DRB1*01:02L
GKAHFPREGVFVSNG

SEQ ID NO: 20009 - protein, 14 aa, Severe acute respiratory syndrome coronavirus 2
  REGION 1..14: note = Table B: HLA-DRB1*01:02L
FPREGVFVSNGTHW

SEQ ID NO: 20010 - protein, 14 aa, Severe acute respiratory syndrome coronavirus 2
  REGION 1..14: note = Table B: HLA-DRB1*01:02L HLA-DPA1*03:01-B1*105:01L
VSNGTHWFVTQRNF

SEQ ID NO: 20011 - protein, 13 aa, Severe acute respiratory syndrome coronavirus 2
  REGION 1..13: note = Table B: HLA-DRB1*01:02L HLA-DRB1*08:04L
NGTHWFVTQRNFY

SEQ ID NO: 20012 - protein, 12 aa, Severe acute respiratory syndrome coronavirus 2
  REGION 1..12: note = Table B: HLA-DRB1*01:02L
VIGIVNNTVYDP

SEQ ID NO: 20013 - protein, 12 aa, Severe acute respiratory syndrome coronavirus 2
  REGION 1..12: note = Table B: HLA-DRB1*01:02L HLA-DPA1*01:03-B1*03:01L HLA-DRB1*14:02L HLA-DPA1*01:03-B1*04:02L HLA-DQA1*05:05-B1*03:01L
VYDPLQPELDSF

SEQ ID NO: 20014 - protein, 13 aa, Severe acute respiratory syndrome coronavirus 2
  REGION 1..13: note = Table B: HLA-DRB1*01:02L
LDSFKEELDKYFK

SEQ ID NO: 20015 - protein, 14 aa, Severe acute respiratory syndrome coronavirus 2
  REGION 1..14: note = Table B: HLA-DRB1*01:02L
DSFKEELDKYFKNH

SEQ ID NO: 20016 - protein, 12 aa, Severe acute respiratory syndrome coronavirus 2
  REGION 1..12: note = Table B: HLA-DRB1*01:02L HLA-DQA1*05:01-B1*02:01L HLA-DRB1*12:01L HLA-DPA1*02:01-B1*13:01L HLA-DQA1*01:03-B1*06:01L HLA-DRB1*15:03L
FKNHTSPDVDLG

SEQ ID NO: 20017 - protein, 15 aa, Severe acute respiratory syndrome coronavirus 2
  REGION 1..15: note = Table B: HLA-DRB1*01:02L HLA-DPA1*01:03-B1*03:01L
SPDVDLGDISGINAS

SEQ ID NO: 20018 - protein, 12 aa, Severe acute respiratory syndrome coronavirus 2
  REGION 1..12: note = Table B: HLA-DRB1*01:02L
KEIDRLNEVAKN

SEQ ID NO: 20019 - protein, 13 aa, Severe acute respiratory syndrome coronavirus 2
  REGION 1..13: note = Table B: HLA-DRB1*01:02L HLA-DRB1*11:04L HLA-DRB1*11:01L HLA-DRB1*16:01L HLA-DRB1*08:03L
DRLNEVAKNLNES

SEQ ID NO: 20020 - protein, 14 aa, Severe acute respiratory syndrome coronavirus 2
  REGION 1..14: note = Table B: HLA-DRB1*01:02L HLA-DPA1*01:03-B1*03:01L HLA-DPA1*03:01-B1*04:02L
AKNLNESLIDLQEL

SEQ ID NO: 20021 - protein, 13 aa, Severe acute respiratory syndrome coronavirus 2
  REGION 1..13: note = Table B: HLA-DRB1*01:02L
NESLIDLQELGKY

SEQ ID NO: 20022 - protein, 12 aa, Severe acute respiratory syndrome coronavirus 2
  REGION 1..12: note = Table B: HLA-DRB1*01:02L HLA-DRB1*04:08L
SLIDLQELGKYE

SEQ ID NO: 20023 - protein, 12 aa, Severe acute respiratory syndrome coronavirus 2
  REGION 1..12: note = Table B: HLA-DRB1*01:02L HLA-DRB1*08:04L HLA-DRB1*04:08L
LIDLQELGKYEQ

SEQ ID NO: 20024 - protein, 14 aa, Severe acute respiratory syndrome coronavirus 2
  REGION 1..14: note = Table B: HLA-DRB1*01:02L
LQELGKYEQYIKWP

SEQ ID NO: 20025 - protein, 12 aa, Severe acute respiratory syndrome coronavirus 2
  REGION 1..12: note = Table B: HLA-DRB1*01:02L HLA-DRB3*01:01L HLA-DPA1*03:01-B1*105:01L
KFDEDDSEPVLK

SEQ ID NO: 20026 - protein, 12 aa, Severe acute respiratory syndrome coronavirus 2
  REGION 1..12: note = Table B: HLA-DRB1*01:02L HLA-DQA1*03:01-B1*03:02L HLA-DQA1*01:03-B1*06:01L
EPVLKGVKLHYT

SEQ ID NO: 20027 - protein, 14 aa, Severe acute respiratory syndrome coronavirus 2
  REGION 1..14: note = Table B: HLA-DRB1*01:02L HLA-DRB1*12:01L HLA-DQA1*05:05-B1*03:01L HLA-DRB1*15:03L
IVGVALLAVFQSAS

SEQ ID NO: 20028 - protein, 12 aa, Severe acute respiratory syndrome coronavirus 2
  REGION 1..12: note = Table B: HLA-DRB1*01:02L HLA-DRB1*16:01L
FVTVYSHLLLVA

SEQ ID NO: 20029 - protein, 12 aa, Severe acute respiratory syndrome coronavirus 2
  REGION 1..12: note = Table B: HLA-DRB1*01:02L
PYNSVTSSIVIT

SEQ ID NO: 20030 - protein, 13 aa, Severe acute respiratory syndrome coronavirus 2
  REGION 1..13: note = Table B: HLA-DRB1*01:02L
GDGTTSPISEHDY

SEQ ID NO: 20031 - protein, 13 aa, Severe acute respiratory syndrome coronavirus 2
  REGION 1..13: note = Table B: HLA-DRB1*01:02L HLA-DRB1*04:10L
DGTTSPISEHDYQ

SEQ ID NO: 20032 - protein, 12 aa, Severe acute respiratory syndrome coronavirus 2
  REGION 1..12: note = Table B: HLA-DRB1*01:02L
DYQIGGYTEKWE

SEQ ID NO: 20033 - protein, 13 aa, Severe acute respiratory syndrome coronavirus 2
  REGION 1..13: note = Table B: HLA-DRB1*01:02L
YQIGGYTEKWESG

SEQ ID NO: 20034 - protein, 13 aa, Severe acute respiratory syndrome coronavirus 2
  REGION 1..13: note = Table B: HLA-DRB1*01:02L HLA-DPA1*02:01-B1*13:01L HLA-DQA1*03:01-B1*03:02L HLA-DPA1*01:02-B1*04:01L
VVLHSYFTSDYYQ

SEQ ID NO: 20035 - protein, 11 aa, Severe acute respiratory syndrome coronavirus 2
  REGION 1..11: note = Table B: HLA-DRB1*01:02L
YYQLYSTQLST

SEQ ID NO: 20036 - protein, 15 aa, Severe acute respiratory syndrome coronavirus 2
  REGION 1..15: note = Table B: HLA-DRB1*01:02L HLA-DRB1*04:10L HLA-DRB1*12:01L
EPEEHVQIHTIDGSS

SEQ ID NO: 20037 - protein, 12 aa, Severe acute respiratory syndrome coronavirus 2
  REGION 1..12: note = Table B: HLA-DRB1*01:02L HLA-DRB1*14:01L HLA-DRB1*16:01L
LAILTALRLCAY

SEQ ID NO: 20038 - protein, 12 aa, Severe acute respiratory syndrome coronavirus 2
  REGION 1..12: note = Table B: HLA-DRB1*01:02L
VSLVKPSFYVYS

SEQ ID NO: 20039 - protein, 12 aa, Severe acute respiratory syndrome coronavirus 2
  REGION 1..12: note = Table B: HLA-DRB1*01:02L HLA-DRB1*08:04L HLA-DPA1*03:01-B1*04:02L HLA-DRB1*14:01L HLA-DRB1*12:01L HLA-DPA1*03:01-B1*105:01L HLA-DRB1*15:03L
PSFYVYSRVKNL

SEQ ID NO: 20040 - protein, 14 aa, Severe acute respiratory syndrome coronavirus 2
  REGION 1..14: note = Table B: HLA-DRB1*01:02L
VEELKKLLEQWNLV

SEQ ID NO: 20041 - protein, 12 aa, Severe acute respiratory syndrome coronavirus 2
  REGION 1..12: note = Table B: HLA-DRB1*01:02L HLA-DRB1*12:01L HLA-DPA1*02:01-B1*13:01L HLA-DPA1*03:01-B1*105:01L HLA-DRB1*15:03L
KKLLEQWNLVIG

SEQ ID NO: 20042 - protein, 13 aa, Severe acute respiratory syndrome coronavirus 2
  REGION 1..13: note = Table B: HLA-DRB1*01:02L
ICLLQFAYANRNR

SEQ ID NO: 20043 - protein, 11 aa, Severe acute respiratory syndrome coronavirus 2
  REGION 1..11: note = Table B: HLA-DRB1*01:02L HLA-DPA1*03:01-B1*04:02L HLA-DPA1*03:01-B1*105:01L
LQFAYANRNRF

SEQ ID NO: 20044 - protein, 10 aa, Severe acute respiratory syndrome coronavirus 2
  REGION 1..10: note = Table B: HLA-DRB1*01:02L HLA-DRB1*14:01L HLA-DPA1*01:02-B1*04:01L HLA-DRB1*16:01L HLA-DQA1*02:01-B1*03:03L HLA-DRB1*15:03L
FAYANRNRFL

SEQ ID NO: 20045 - protein, 12 aa, Severe acute respiratory syndrome coronavirus 2
  REGION 1..12: note = Table B: HLA-DRB1*01:02L
YANRNRFLYIIK

SEQ ID NO: 20046 - protein, 14 aa, Severe acute respiratory syndrome coronavirus 2
  REGION 1..14: note = Table B: HLA-DRB1*01:02L
FRLFARTRSMWSFN

SEQ ID NO: 20047 - protein, 13 aa, Severe acute respiratory syndrome coronavirus 2
  REGION 1..13: note = Table B: HLA-DRB1*01:02L HLA-DPA1*02:01-B1*13:01L
RTRSMWSFNPETN

SEQ ID NO: 20048 - protein, 11 aa, Severe acute respiratory syndrome coronavirus 2
  REGION 1..11: note = Table B: HLA-DRB1*01:02L
SFNPETNILLN

SEQ ID NO: 20049 - protein, 12 aa, Severe acute respiratory syndrome coronavirus 2
  REGION 1..12: note = Table B: HLA-DRB1*01:02L
NVPLHGTILTRP

SEQ ID NO: 20050 - protein, 14 aa, Severe acute respiratory syndrome coronavirus 2
  REGION 1..14: note = Table B: HLA-DRB1*01:02L HLA-DPA1*02:01-B1*13:01L HLA-DRB1*15:03L
ILTRPLLESELVIG

SEQ ID NO: 20051 - protein, 14 aa, Severe acute respiratory syndrome coronavirus 2
  REGION 1..14: note = Table B: HLA-DRB1*01:02L HLA-DRB1*15:03L
LESELVIGAVILRG

SEQ ID NO: 20052 - protein, 13 aa, Severe acute respiratory syndrome coronavirus 2
  REGION 1..13: note = Table B: HLA-DRB1*01:02L HLA-DRB1*04:08L
SELVIGAVILRGH

SEQ ID NO: 20053 - protein, 15 aa, Severe acute respiratory syndrome coronavirus 2
  REGION 1..15: note = Table B: HLA-DRB1*01:02L
HLRIAGHHLGRCDIK

SEQ ID NO: 20054 - protein, 14 aa, Severe acute respiratory syndrome coronavirus 2
  REGION 1..14: note = Table B: HLA-DRB1*01:02L
RIAGHHLGRCDIKD

SEQ ID NO: 20055 - protein, 14 aa, Severe acute respiratory syndrome coronavirus 2
  REGION 1..14: note = Table B: HLA-DRB1*01:02L HLA-DRB1*08:01L
GHHLGRCDIKDLPK

SEQ ID NO: 20056 - protein, 12 aa, Severe acute respiratory syndrome coronavirus 2
  REGION 1..12: note = Table B: HLA-DRB1*01:02L HLA-DRB1*04:08L
TVATSRTLSYYK

SEQ ID NO: 20057 - protein, 13 aa, Severe acute respiratory syndrome coronavirus 2
  REGION 1..13: note = Table B: HLA-DRB1*01:02L
VATSRTLSYYKLG

SEQ ID NO: 20058 - protein, 11 aa, Severe acute respiratory syndrome coronavirus 2
  REGION 1..11: note = Table B: HLA-DRB1*01:02L HLA-DQA1*05:05-B1*03:19L HLA-DRB1*15:03L
SYYKLGASQRV

SEQ ID NO: 20059 - protein, 12 aa, Severe acute respiratory syndrome coronavirus 2
  REGION 1..12: note = Table B: HLA-DRB1*01:02L HLA-DRB1*14:01L HLA-DRB1*12:01L HLA-DRB1*16:01L HLA-DRB1*15:03L
FAAYSRYRIGNY

SEQ ID NO: 20060 - protein, 12 aa, Severe acute respiratory syndrome coronavirus 2
  REGION 1..12: note = Table B: HLA-DRB1*01:02L HLA-DRB1*08:04L HLA-DRB1*11:03L HLA-DQA1*03:01-B1*03:02L HLA-DRB1*10:01L HLA-DRB1*15:03L
NYKLNTDHSSSS

SEQ ID NO: 20061 - protein, 13 aa, Severe acute respiratory syndrome coronavirus 2
  REGION 1..13: note = Table B: HLA-DRB1*01:02L HLA-DRB1*14:01L HLA-DPA1*02:01-B1*13:01L
IKNLSKSLTENKY

SEQ ID NO: 20062 - protein, 13 aa, Severe acute respiratory syndrome coronavirus 2
  REGION 1..13: note = Table B: HLA-DRB1*01:02L
NLSKSLTENKYSQ

SEQ ID NO: 20063 - protein, 12 aa, Severe acute respiratory syndrome coronavirus 2
  REGION 1..12: note = Table B: HLA-DRB1*01:02L HLA-DRB1*12:01L HLA-DRB1*15:03L
ALITLATCELYH

SEQ ID NO: 20064 - protein, 13 aa, Severe acute respiratory syndrome coronavirus 2
  REGION 1..13: note = Table B: HLA-DRB1*01:02L
LITLATCELYHYQ

SEQ ID NO: 20065 - protein, 15 aa, Severe acute respiratory syndrome coronavirus 2
  REGION 1..15: note = Table B: HLA-DRB1*01:02L
GTTVLLKEPCSSGTY

SEQ ID NO: 20066 - protein, 14 aa, Severe acute respiratory syndrome coronavirus 2
  REGION 1..14: note = Table B: HLA-DRB1*01:02L HLA-DPA1*01:03-B1*03:01L HLA-DRB1*15:03L
TYEGNSPFHPLADN

SEQ ID NO: 20067 - protein, 14 aa, Severe acute respiratory syndrome coronavirus 2
  REGION 1..14: note = Table B: HLA-DRB1*01:02L
YEGNSPFHPLADNK

SEQ ID NO: 20068 - protein, 15 aa, Severe acute respiratory syndrome coronavirus 2
  REGION 1..15: note = Table B: HLA-DRB1*01:02L
LTCFSTQFAFACPDG

SEQ ID NO: 20069 - protein, 14 aa, Severe acute respiratory syndrome coronavirus 2
  REGION 1..14: note = Table B: HLA-DRB1*01:02L
FAFACPDGVKHVYQ

SEQ ID NO: 20070 - protein, 13 aa, Severe acute respiratory syndrome coronavirus 2
  REGION 1..13: note = Table B: HLA-DRB1*01:02L
PDGVKHVYQLRAR

SEQ ID NO: 20071 - protein, 13 aa, Severe acute respiratory syndrome coronavirus 2
  REGION 1..13: note = Table B: HLA-DRB1*01:02L
LRARSVSPKLFIR

SEQ ID NO: 20072 - protein, 14 aa, Severe acute respiratory syndrome coronavirus 2
  REGION 1..14: note = Table B: HLA-DRB1*01:02L
RARSVSPKLFIRQE

SEQ ID NO: 20073 - protein, 12 aa, Severe acute respiratory syndrome coronavirus 2
  REGION 1..12: note = Table B: HLA-DRB1*01:02L HLA-DQA1*05:05-B1*03:01L
LFIRQEEVQELY

SEQ ID NO: 20074 - protein, 12 aa, Severe acute respiratory syndrome coronavirus 2
  REGION 1..12: note = Table B: HLA-DRB1*01:02L
FIRQEEVQELYS

SEQ ID NO: 20075 - protein, 10 aa, Severe acute respiratory syndrome coronavirus 2
  REGION 1..10: note = Table B: HLA-DRB1*01:02L HLA-DRB1*16:01L
ITLCFTLKRK

SEQ ID NO: 20076 - protein, 14 aa, Severe acute respiratory syndrome coronavirus 2
  REGION 1..14: note = Table B: HLA-DRB1*01:02L HLA-DQA1*05:05-B1*03:01L
AAFHQECSLQSCTQ

SEQ ID NO: 20077 - protein, 13 aa, Severe acute respiratory syndrome coronavirus 2
  REGION 1..13: note = Table B: HLA-DRB1*01:02L HLA-DRB1*08:01L HLA-DRB1*12:01L
PIHFYSKWYIRVG

SEQ ID NO: 20078 - protein, 14 aa, Severe acute respiratory syndrome coronavirus 2
  REGION 1..14: note = Table B: HLA-DRB1*01:02L HLA-DRB1*11:01L HLA-DRB1*12:01L
IHFYSKWYIRVGAR

SEQ ID NO: 20079 - protein, 14 aa, Severe acute respiratory syndrome coronavirus 2
  REGION 1..14: note = Table B: HLA-DRB1*01:02L
HFYSKWYIRVGARK

SEQ ID NO: 20080 - protein, 14 aa, Severe acute respiratory syndrome coronavirus 2
  REGION 1..14: note = Table B: HLA-DRB1*01:02L HLA-DRB1*08:01L HLA-DRB1*11:01L
VDEAGSKSPIQYID

SEQ ID NO: 20081 - protein, 16 aa, Severe acute respiratory syndrome coronavirus 2
  REGION 1..16: note = Table B: HLA-DRB1*01:02L HLA-DRB1*15:03L
YTVSCLPFTINCQEPK

SEQ ID NO: 20082 - protein, 14 aa, Severe acute respiratory syndrome coronavirus 2
  REGION 1..14: note = Table B: HLA-DRB1*01:02L
INCQEPKLGSLVVR

SEQ ID NO: 20083 - protein, 13 aa, Severe acute respiratory syndrome coronavirus 2
  REGION 1..13: note = Table B: HLA-DRB1*01:02L
QEPKLGSLVVRCS

SEQ ID NO: 20084 - protein, 15 aa, Severe acute respiratory syndrome coronavirus 2
  REGION 1..15: note = Table B: HLA-DRB1*01:02L
EPKLGSLVVRCSFYE

SEQ ID NO: 20085 - protein, 16 aa, Severe acute respiratory syndrome coronavirus 2
  REGION 1..16: note = Table B: HLA-DRB1*01:02L HLA-DQA1*01:03-B1*06:01L
GPQNQRNAPRITFGGP

SEQ ID NO: 20086 - protein, 14 aa, Severe acute respiratory syndrome coronavirus 2
  REGION 1..14: note = Table B: HLA-DRB1*01:02L
NGERSGARSKQRRP

SEQ ID NO: 20087 - protein, 14 aa, Severe acute respiratory syndrome coronavirus 2
  REGION 1..14: note = Table B: HLA-DRB1*01:02L
GERSGARSKQRRPQ

SEQ ID NO: 20088 - protein, 14 aa, Severe acute respiratory syndrome coronavirus 2
  REGION 1..14: note = Table B: HLA-DRB1*01:02L HLA-DRB1*12:01L HLA-DPA1*02:01-B1*13:01L
SKQRRPQGLPNNTA

SEQ ID NO: 20089 - protein, 15 aa, Severe acute respiratory syndrome coronavirus 2
  REGION 1..15: note = Table B: HLA-DRB1*01:02L HLA-DRB1*16:01L
TQHGKEDLKFPRGQG

SEQ ID NO: 20090 - protein, 14 aa, Severe acute respiratory syndrome coronavirus 2
  REGION 1..14: note = Table B: HLA-DRB1*01:02L
TNSSPDDQIGYYRR

SEQ ID NO: 20091 - protein, 12 aa, Severe acute respiratory syndrome coronavirus 2
  REGION 1..12: note = Table B: HLA-DRB1*01:02L HLA-DRB1*08:01L HLA-DRB3*01:01L HLA-DRB1*16:01L HLA-DRB1*04:08L
IGYYRRATRRIR

SEQ ID NO: 20092 - protein, 12 aa, Severe acute respiratory syndrome coronavirus 2
  REGION 1..12: note = Table B: HLA-DRB1*01:02L HLA-DPA1*03:01-B1*105:01L HLA-DPA1*01:02-B1*04:01L
DGKMKDLSPRWY

SEQ ID NO: 20093 - protein, 13 aa, Severe acute respiratory syndrome coronavirus 2
  REGION 1..13: note = Table B: HLA-DRB1*01:02L HLA-DPA1*01:03-B1*03:01L
TGPEAGLPYGANK

SEQ ID NO: 20094 - protein, 13 aa, Severe acute respiratory syndrome coronavirus 2
  REGION 1..13: note = Table B: HLA-DRB1*01:02L HLA-DRB1*12:01L
GPEAGLPYGANKD

SEQ ID NO: 20095 - protein, 12 aa, Severe acute respiratory syndrome coronavirus 2
  REGION 1..12: note = Table B: HLA-DRB1*01:02L HLA-DRB1*08:01L HLA-DQA1*05:05-B1*03:19L HLA-DPA1*03:01-B1*105:01L HLA-DRB1*14:54L HLA-DRB1*10:01L HLA-DRB1*04:08L
ATEGALNTPKDH

SEQ ID NO: 20096 - protein, 14 aa, Severe acute respiratory syndrome coronavirus 2
  REGION 1..14: note = Table B: HLA-DRB1*01:02L
EGALNTPKDHIGTR

SEQ ID NO: 20097 - protein, 16 aa, Severe acute respiratory syndrome coronavirus 2
  REGION 1..16: note = Table B: HLA-DRB1*01:02L
GALNTPKDHIGTRNPA

SEQ ID NO: 20098 - protein, 12 aa, Severe acute respiratory syndrome coronavirus 2
  REGION 1..12: note = Table B: HLA-DRB1*01:02L
VLQLPQGTTLPK

SEQ ID NO: 20099 - protein, 15 aa, Severe acute respiratory syndrome coronavirus 2
  REGION 1..15: note = Table B: HLA-DRB1*01:02L
LPQGTTLPKGFYAEG

SEQ ID NO: 20100 - protein, 14 aa, Severe acute respiratory syndrome coronavirus 2
  REGION 1..14: note = Table B: HLA-DRB1*01:02L
YAEGSRGGSQASSR

SEQ ID NO: 20101 - protein, 14 aa, Severe acute respiratory syndrome coronavirus 2
  REGION 1..14: note = Table B: HLA-DRB1*01:02L HLA-DRB1*08:01L HLA-DRB1*04:08L
SRGGSQASSRSSSR

SEQ ID NO: 20102 - protein, 14 aa, Severe acute respiratory syndrome coronavirus 2
  REGION 1..14: note = Table B: HLA-DRB1*01:02L
SRNSSRNSTPGSSR

SEQ ID NO: 20103 - protein, 16 aa, Severe acute respiratory syndrome coronavirus 2
  REGION 1..16: note = Table B: HLA-DRB1*01:02L
SSRNSTPGSSRGTSPA

SEQ ID NO: 20104 - protein, 16 aa, Severe acute respiratory syndrome coronavirus 2
  REGION 1..16: note = Table B: HLA-DRB1*01:02L
SSRGTSPARMAGNGGD

SEQ ID NO: 20105 - protein, 14 aa, Severe acute respiratory syndrome coronavirus 2
  REGION 1..14: note = Table B: HLA-DRB1*01:02L HLA-DPA1*01:03-B1*03:01L HLA-DRB1*14:01L HLA-DQA1*01:01-B1*05:01L HLA-DRB1*08:01L HLA-DQA1*05:01-B1*02:01L HLA-DRB1*04:10L HLA-DRB1*12:01L HLA-DPA1*03:01-B1*105:01L HLA-DRB1*04:08L
GTSPARMAGNGGDA

SEQ ID NO: 20106 - protein, 13 aa, Severe acute respiratory syndrome coronavirus 2
  REGION 1..13: note = Table B: HLA-DRB1*01:02L HLA-DRB3*02:01L HLA-DPA1*01:03-B1*03:01L HLA-DQA1*01-B1*05L HLA-DPA1*01:03-B1*04:01L HLA-DPA1*01:03-B1*04:02L HLA-DPA1*02:01-B1*13:01L HLA-DRB1*16:01L HLA-DRB1*04:08L
DAALALLLLDRLN

SEQ ID NO: 20107 - protein, 16 aa, Severe acute respiratory syndrome coronavirus 2
  REGION 1..16: note = Table B: HLA-DRB1*01:02L HLA-DRB1*11:01L HLA-DPA1*02:01-B1*13:01L
LESKMSGKGQQQQGQT

SEQ ID NO: 20108 - protein, 12 aa, Severe acute respiratory syndrome coronavirus 2
  REGION 1..12: note = Table B: HLA-DRB1*01:02L
KKSAAEASKKPR

SEQ ID NO: 20109 - protein, 13 aa, Severe acute respiratory syndrome coronavirus 2
  REGION 1..13: note = Table B: HLA-DRB1*01:02L
KSAAEASKKPRQK

SEQ ID NO: 20110 - protein, 13 aa, Severe acute respiratory syndrome coronavirus 2
  REGION 1..13: note = Table B: HLA-DRB1*01:02L
SAAEASKKPRQKR

SEQ ID NO: 20111 - protein, 16 aa, Severe acute respiratory syndrome coronavirus 2
  REGION 1..16: note = Table B: HLA-DRB1*01:02L HLA-DRB3*01:01L
AAEASKKPRQKRTATK

SEQ ID NO: 20112 - protein, 12 aa, Severe acute respiratory syndrome coronavirus 2
  REGION 1..12: note = Table B: HLA-DRB1*01:02L
RTATKAYNVTQA

SEQ ID NO: 20113 - protein, 12 aa, Severe acute respiratory syndrome coronavirus 2
  REGION 1..12: note = Table B: HLA-DRB1*01:02L HLA-DRB1*04:08L HLA-DQA1*02:01-B1*03:03L
TKAYNVTQAFGR

SEQ ID NO: 20114 - protein, 13 aa, Severe acute respiratory syndrome coronavirus 2
  REGION 1..13: note = Table B: HLA-DRB1*01:02L
QGNFGDQELIRQG

SEQ ID NO: 20115 - protein, 14 aa, Severe acute respiratory syndrome coronavirus 2
  REGION 1..14: note = Table B: HLA-DRB1*01:02L HLA-DRB1*08:04L HLA-DRB1*08:01L HLA-DRB1*15:03L
GNFGDQELIRQGTD

SEQ ID NO: 20116 - protein, 14 aa, Severe acute respiratory syndrome coronavirus 2
  REGION 1..14: note = Table B: HLA-DRB1*01:02L
FGDQELIRQGTDYK

SEQ ID NO: 20117 - protein, 14 aa, Severe acute respiratory syndrome coronavirus 2
  REGION 1..14: note = Table B: HLA-DRB1*01:02L HLA-DRB1*08:04L HLA-DRB1*08:01L HLA-DRB1*12:01L HLA-DRB1*15:03L
TDYKHWPQIAQFAP

SEQ ID NO: 20118 - protein, 13 aa, Severe acute respiratory syndrome coronavirus 2
  REGION 1..13: note = Table B: HLA-DRB1*01:02L HLA-DRB1*04:08L
FAPSASAFFGMSR

SEQ ID NO: 20119 - protein, 12 aa, Severe acute respiratory syndrome coronavirus 2
  REGION 1..12: note = Table B: HLA-DRB1*01:02L
AYKTFPPTEPKK

SEQ ID NO: 20120 - protein, 14 aa, Severe acute respiratory syndrome coronavirus 2
  REGION 1..14: note = Table B: HLA-DRB1*01:02L
YKTFPPTEPKKDKK

SEQ ID NO: 20121 - protein, 14 aa, Severe acute respiratory syndrome coronavirus 2
  REGION 1..14: note = Table B: HLA-DRB1*01:02L HLA-DRB1*04:08L
KTFPPTEPKKDKKK

SEQ ID NO: 20122 - protein, 14 aa, Severe acute respiratory syndrome coronavirus 2
  REGION 1..14: note = Table B: HLA-DRB1*01:02L
FPPTEPKKDKKKKA

SEQ ID NO: 20123 - protein, 14 aa, Severe acute respiratory syndrome coronavirus 2
  REGION 1..14: note = Table B: HLA-DRB1*01:02L
KKKADETQALPQRQ

SEQ ID NO: 20124 - protein, 12 aa, Severe acute respiratory syndrome coronavirus 2
  REGION 1..12: note = Table B: HLA-DRB1*01:02L HLA-DQA1*05:05-B1*03:19L HLA-DRB1*04:08L
ETQALPQRQKKQ

SEQ ID NO: 20125 - protein, 16 aa, Severe acute respiratory syndrome coronavirus 2
  REGION 1..16: note = Table B: HLA-DRB1*01:02L
LPQRQKKQQTVTLLPA

SEQ ID NO: 20126 - protein, 15 aa, Severe acute respiratory syndrome coronavirus 2
  REGION 1..15: note = Table B: HLA-DRB1*01:02L HLA-DPA1*02:01-B1*13:01L HLA-DRB1*04:08L
RQKKQQTVTLLPAAD

SEQ ID NO: 20127 - protein, 13 aa, Severe acute respiratory syndrome coronavirus 2
  REGION 1..13: note = Table B: HLA-DRB1*01:02L HLA-DPA1*01:03-B1*03:01L HLA-DRB1*16:01L HLA-DRB1*15:03L
KQQTVTLLPAADL

SEQ ID NO: 20128 - protein, 12 aa, Severe acute respiratory syndrome coronavirus 2
  REGION 1..12: note = Table B: HLA-DRB1*01:02L HLA-DQA1*05:05-B1*03:19L HLA-DPA1*03:01-B1*105:01L HLA-DQA1*05:05-B1*03:01L
VTLLPAADLDDF

SEQ ID NO: 20129 - protein, 13 aa, Severe acute respiratory syndrome coronavirus 2
  REGION 1..13: note = Table B: HLA-DRB1*01:02L HLA-DPA1*03:01-B1*04:02L HLA-DRB1*12:01L HLA-DRB1*16:01L HLA-DRB1*15:03L
LDDFSKQLQQSMS

SEQ ID NO: 20130 - protein, 14 aa, Severe acute respiratory syndrome coronavirus 2
  REGION 1..14: note = Table B: HLA-DRB1*01:02L
DDFSKQLQQSMSSA

SEQ ID NO: 20131 - protein, 15 aa, Severe acute respiratory syndrome coronavirus 2
  REGION 1..15: note = Table B: HLA-DRB1*01:02L HLA-DQA1*05:05-B1*03:19L HLA-DQA1*05:01-B1*02:01L HLA-DRB1*12:01L HLA-DPA1*01:03-B1*104:01L HLA-DQA1*01:03-B1*06:01L
DFSKQLQQSMSSADS

SEQ ID NO: 20132 - protein, 11 aa, Severe acute respiratory syndrome coronavirus 2
  REGION 1..11: note = Table B: HLA-DRB4*03:01NL HLA-DRB1*08:77L HLA-DPA1*01:03-B1*03:01L HLA-DRB1*03:01L HLA-DRB1*14:01L HLA-DPA1*01:03-B1*04:01L HLA-DPA1*01:03-B1*04:02L HLA-DRB1*12:01L HLA-DPA1*02:01-B1*13:01L
  REGION 1..11: note = CONT. FROM ABOVE: HLA-DPA1*01:03-B1*104:01L HLA-DRB1*10:01L HLA- DQA1*01:03-B1*06:01L HLA-DRB1*08:02L HLA-DRB1*15:03L
VPHVGEIPVAY

SEQ ID NO: 20133 - protein, 15 aa, Severe acute respiratory syndrome coronavirus 2
  REGION 1..15: note = Table B: HLA-DRB4*03:01NL HLA-DRB1*11:03L HLA-DRB1*14:54L HLA-DRB1*07:01L
VTRELMRELNGGAYT

SEQ ID NO: 20134 - protein, 15 aa, Severe acute respiratory syndrome coronavirus 2
  REGION 1..15: note = Table B: HLA-DRB4*03:01NL HLA-DRB1*11:04L HLA-DRB1*14:54L HLA-DRB1*10:01L
GAWNIGEQKSILSPL

SEQ ID NO: 20135 - protein, 12 aa, Severe acute respiratory syndrome coronavirus 2
  REGION 1..12: note = Table B: HLA-DRB4*03:01NL HLA-DRB1*14:54L HLA-DRB1*08:03L
GTVYEKLKPVLD

SEQ ID NO: 20136 - protein, 11 aa, Severe acute respiratory syndrome coronavirus 2
  REGION 1..11: note = Table B: HLA-DRB4*03:01NL HLA-DRB1*14:01L HLA-DRB1*11:01L HLA-DPA1*02:01-B1*13:01L
MLLEIKDTEKY

SEQ ID NO: 20137 - protein, 13 aa, Severe acute respiratory syndrome coronavirus 2
  REGION 1..13: note = Table B: HLA-DRB4*03:01NL HLA-DRB1*08:04L HLA-DRB1*08:77L HLA-DRB3*02:01L
INGNLHPDSATLV

SEQ ID NO: 20138 - protein, 11 aa, Severe acute respiratory syndrome coronavirus 2
  REGION 1..11: note = Table B: HLA-DRB4*03:01NL HLA-DRB1*14:01L HLA-DRB1*08:02L
SEYKGPITDVF

SEQ ID NO: 20139 - protein, 12 aa, Severe acute respiratory syndrome coronavirus 2
  REGION 1..12: note = Table B: HLA-DRB4*03:01NL HLA-DRB1*11:02L
EEVGHTDLMAAY

SEQ ID NO: 20140 - protein, 12 aa, Severe acute respiratory syndrome coronavirus 2
  REGION 1..12: note = Table B: HLA-DRB4*03:01NL HLA-DRB3*02:01L HLA-DPA1*01:03-B1*03:01L HLA-DPA1*03:01-B1*04:02L HLA-DQA1*05:05-B1*03:01L
INLVQMAPISAM

SEQ ID NO: 20141 - protein, 15 aa, Severe acute respiratory syndrome coronavirus 2
  REGION 1..15: note = Table B: HLA-DRB4*03:01NL HLA-DRB1*08:77L HLA-DPA1*01:03-B1*03:01L HLA-DRB1*03:01L HLA-DRB1*11:03L HLA-DRB1*14:02L HLA-DRB1*08:01L HLA-DRB1*11:01L HLA-DQA1*05:05-B1*03:19L HLA-DQA1*05:01-B1*02:01L
  REGION 1..15: note = CONT. FROM ABOVE: HLA-DRB3*01:01L
LDNLRANNTKGSLPI

SEQ ID NO: 20142 - protein, 13 aa, Severe acute respiratory syndrome coronavirus 2
  REGION 1..13: note = Table B: HLA-DRB4*03:01NL HLA-DRB3*02:01L HLA-DQA1*05:05-B1*03:19L HLA-DPA1*01:03-B1*04:02L HLA-DPA1*01:02-B1*04:01L HLA-DRB1*10:01L
NVIVFDGKSKCEE

SEQ ID NO: 20143 - protein, 13 aa, Severe acute respiratory syndrome coronavirus 2
  REGION 1..13: note = Table B: HLA-DRB4*03:01NL HLA-DRB1*04:10L
ALVSDVGDSAEVA

SEQ ID NO: 20144 - protein, 12 aa, Severe acute respiratory syndrome coronavirus 2
  REGION 1..12: note = Table B: HLA-DRB4*03:01NL HLA-DRB1*16:01L HLA-DRB1*04:08L
TWLDMVDTSLSG

SEQ ID NO: 20145 - protein, 12 aa, Severe acute respiratory syndrome coronavirus 2
  REGION 1..12: note = Table B: HLA-DRB4*03:01NL HLA-DQA1*01-B1*05L HLA-DRB1*04:10L HLA-DPA1*03:01-B1*105:01L HLA-DRB1*16:01L HLA-DRB1*04:08L
AFATAQEAYEQA

SEQ ID NO: 20146 - protein, 14 aa, Severe acute respiratory syndrome coronavirus 2
  REGION 1..14: note = Table B: HLA-DRB4*03:01NL HLA-DRB3*02:01L HLA-DPA1*01:03-B1*03:01L HLA-DPA1*03:01-B1*04:02L HLA-DPA1*02:01-B1*13:01L HLA-DPA1*01:03-B1*02:01L HLA-DPA1*01:03-B1*104:01L
LGSLAATVRLQAGN

SEQ ID NO: 20147 - protein, 12 aa, Severe acute respiratory syndrome coronavirus 2
  REGION 1..12: note = Table B: HLA-DRB4*03:01NL HLA-DRB1*04:10L HLA-DPA1*03:01-B1*105:01L HLA-DQA1*05:05-B1*03:01L HLA-DRB1*16:01L
GIVGVLTLDNQD

SEQ ID NO: 20148 - protein, 12 aa, Severe acute respiratory syndrome coronavirus 2
  REGION 1..12: note = Table B: HLA-DRB4*03:01NL HLA-DRB1*04:10L HLA-DRB1*12:01L HLA-DPA1*03:01-B1*105:01L HLA-DRB1*14:54L HLA-DQA1*05:05-B1*03:01L HLA-DRB1*16:01L
IVGVLTLDNQDL

SEQ ID NO: 20149 - protein, 12 aa, Severe acute respiratory syndrome coronavirus 2
  REGION 1..12: note = Table B: HLA-DRB4*03:01NL HLA-DRB1*16:01L
GVLTLDNQDLNG

SEQ ID NO: 20150 - protein, 14 aa, Severe acute respiratory syndrome coronavirus 2
  REGION 1..14: note = Table B: HLA-DRB4*03:01NL HLA-DRB1*11:02L
WDLLKYDFTEERLK

SEQ ID NO: 20151 - protein, 13 aa, Severe acute respiratory syndrome coronavirus 2
  REGION 1..13: note = Table B: HLA-DRB4*03:01NL HLA-DRB1*08:04L
GDDYVYLPYPDPS

SEQ ID NO: 20152 - protein, 15 aa, Severe acute respiratory syndrome coronavirus 2
  REGION 1..15: note = Table B: HLA-DRB4*03:01NL HLA-DRB1*08:04L HLA-DRB1*11:04L HLA-DRB1*14:02L HLA-DRB1*04:10L HLA-DPA1*02:01-B1*13:01L HLA-DPA1*01:03-B1*02:01L
FVLTSHTVMPLSAPT

SEQ ID NO: 20153 - protein, 13 aa, Severe acute respiratory syndrome coronavirus 2
  REGION 1..13: note = Table B: HLA-DRB4*03:01NL HLA-DRB1*11:04L HLA-DRB1*09:01L HLA-DRB3*01:01L
LALYYPSARIVYT

SEQ ID NO: 20154 - protein, 11 aa, Severe acute respiratory syndrome coronavirus 2
  REGION 1..11: note = Table B: HLA-DRB4*03:01NL HLA-DQA1*03:01-B1*03:02L
TRVLSNLNLPG

SEQ ID NO: 20155 - protein, 12 aa, Severe acute respiratory syndrome coronavirus 2
  REGION 1..12: note = Table B: HLA-DRB4*03:01NL HLA-DRB1*08:04L HLA-DRB1*14:01L HLA-DRB1*08:01L HLA-DRB1*04:10L HLA-DRB1*12:01L HLA-DRB1*14:54L HLA-DRB1*14:17L HLA-DRB1*04:08L HLA-DRB1*08:03L
NTVYTKVDGVDV

SEQ ID NO: 20156 - protein, 11 aa, Severe acute respiratory syndrome coronavirus 2
  REGION 1..11: note = Table B: HLA-DRB4*03:01NL HLA-DRB1*14:17L HLA-DQA1*02:01-B1*03:03L
LVRDLPQGFSA

SEQ ID NO: 20157 - protein, 14 aa, Severe acute respiratory syndrome coronavirus 2
  REGION 1..14: note = Table B: HLA-DRB4*03:01NL HLA-DRB1*14:17L
GEVFNATRFASVYA

SEQ ID NO: 20158 - protein, 13 aa, Severe acute respiratory syndrome coronavirus 2
  REGION 1..13: note = Table B: HLA-DRB4*03:01NL HLA-DRB1*08:04L HLA-DRB1*14:02L HLA-DQA1*01:01-B1*05:01L HLA-DRB1*04:10L HLA-DRB1*14:17L HLA-DRB1*10:01L HLA-DRB1*08:03L
GGFNFSQILPDPS

SEQ ID NO: 20159 - protein, 11 aa, Severe acute respiratory syndrome coronavirus 2
  REGION 1..11: note = Table B: HLA-DRB4*03:01NL HLA-DQA1*01-B1*05L
KLQDVVNQNAQ

SEQ ID NO: 20160 - protein, 11 aa, Severe acute respiratory syndrome coronavirus 2
  REGION 1..11: note = Table B: HLA-DRB4*03:01NL HLA-DQA1*01:01-B1*05:01L HLA-DRB1*04:10L HLA-DQA1*05:05-B1*03:01L HLA-DRB1*14:17L HLA-DRB1*04:08L
TVYDPLQPELD

SEQ ID NO: 20161 - protein, 11 aa, Severe acute respiratory syndrome coronavirus 2
  REGION 1..11: note = Table B: HLA-DRB4*03:01NL HLA-DRB1*04:08L
SWFTALTQHGK

SEQ ID NO: 20162 - protein, 12 aa, Severe acute respiratory syndrome coronavirus 2
  REGION 1..12: note = Table B: HLA-DRB1*08:04L HLA-DRB1*14:54L
VPGFNEKTHVQL

SEQ ID NO: 20163 - protein, 15 aa, Severe acute respiratory syndrome coronavirus 2
  REGION 1..15: note = Table B: HLA-DRB1*08:04L HLA-DRB3*02:01L HLA-DQA1*05:05-B1*03:19L HLA-DQA1*05:05-B1*03:01L
LPVLQVRDVLVRGFG

SEQ ID NO: 20164 - protein, 13 aa, Severe acute respiratory syndrome coronavirus 2
  REGION 1..13: note = Table B: HLA-DRB1*08:04L HLA-DRB1*03:01L HLA-DRB1*11:03L HLA-DRB1*11:01L HLA-DRB1*08:03L
VEEVLSEARQHLK

SEQ ID NO: 20165 - protein, 12 aa, Severe acute respiratory syndrome coronavirus 2
  REGION 1..12: note = Table B: HLA-DRB1*08:04L HLA-DRB1*12:02L HLA-DRB1*14:54L HLA-DPA1*01:03-B1*104:01L
GIQYGRSGETLG

SEQ ID NO: 20166 - protein, 16 aa, Severe acute respiratory syndrome coronavirus 2
  REGION 1..16: note = Table B: HLA-DRB1*08:04L HLA-DRB1*10:01L
SGETLGVLVPHVGEIP

SEQ ID NO: 20167 - protein, 14 aa, Severe acute respiratory syndrome coronavirus 2
  REGION 1..14: note = Table B: HLA-DRB1*08:04L
LGVLVPHVGEIPVA

SEQ ID NO: 20168 - protein, 13 aa, Severe acute respiratory syndrome coronavirus 2
  REGION 1..13: note = Table B: HLA-DRB1*08:04L HLA-DRB1*14:54L HLA-DRB1*04:08L HLA-DRB1*08:03L
GHSYGADLKSFDL

SEQ ID NO: 20169 - protein, 15 aa, Severe acute respiratory syndrome coronavirus 2
  REGION 1..15: note = Table B: HLA-DRB1*08:04L HLA-DPA1*01:03-B1*02:01L
RELNGGAYTRYVDNN

SEQ ID NO: 20170 - protein, 17 aa, Severe acute respiratory syndrome coronavirus 2
  REGION 1..17: note = Table B: HLA-DRB1*08:04L HLA-DRB1*11:01L
IKDLLARAGKASCTLSE

SEQ ID NO: 20171 - protein, 14 aa, Severe acute respiratory syndrome coronavirus 2
  REGION 1..14: note = Table B: HLA-DRB1*08:04L HLA-DRB1*11:01L HLA-DRB1*16:01L
RGVYCCREHEHEIA

SEQ ID NO: 20172 - protein, 11 aa, Severe acute respiratory syndrome coronavirus 2
  REGION 1..11: note = Table B: HLA-DRB1*08:04L HLA-DPA1*01:03-B1*03:01L HLA-DRB1*11:03L HLA-DRB1*11:04L HLA-DRB1*14:02L HLA-DRB1*08:01L HLA-DQA1*01-B1*05L HLA-DPA1*01:03-B1*04:01L HLA-DRB1*04:10L HLA-DRB1*09:01L HLA-DPA1*02:01-B1*13:01L HLA-DRB1*07:01L
SIIKTIQPRVE

SEQ ID NO: 20173 - protein, 12 aa, Severe acute respiratory syndrome coronavirus 2
  REGION 1..12: note = Table B: HLA-DRB1*08:04L HLA-DRB3*02:01L HLA-DPA1*01:03-B1*03:01L HLA-DPA1*03:01-B1*04:02L HLA-DRB1*11:04L HLA-DRB1*14:02L HLA-DQA1*01:01-B1*05:01L HLA-DRB1*11:01L HLA-DQA1*01-B1*05L HLA-DPA1*01:03-B1*04:01L
  REGION 1..12: note = CONT. FROM ABOVE: HLA-DRB1*09:01L HLA-DPA1*01:03-B1*04:02L HLA-D PA1*02:01-B1*13:01L HLA-DPA1*01:03-B1*104:01L HLA-DRB1*07:01L HL A-DRB1*10:01L HLA-DRB1*08:03L
AYWVPRASANIG

SEQ ID NO: 20174 - protein, 11 aa, Severe acute respiratory syndrome coronavirus 2
  REGION 1..11: note = Table B: HLA-DRB1*08:04L HLA-DRB1*08:77L HLA-DPA1*03:01-B1*04:02L HLA-DRB1*11:04L HLA-DRB3*01:01L
NIVGDFKLNEE

SEQ ID NO: 20175 - protein, 16 aa, Severe acute respiratory syndrome coronavirus 2
  REGION 1..16: note = Table B: HLA-DRB1*08:04L HLA-DPA1*03:01-B1*04:02L HLA-DPA1*01:03-B1*04:02L HLA-DQA1*05:05-B1*03:01L HLA-DQA1*01:03-B1*06:01L
DYKAFKQIVESCGNFK

SEQ ID NO: 20176 - protein, 13 aa, Severe acute respiratory syndrome coronavirus 2
  REGION 1..13: note = Table B: HLA-DRB1*08:04L HLA-DRB3*02:01L HLA-DRB1*04:10L
ITILDGISQYSLR

SEQ ID NO: 20177 - protein, 16 aa, Severe acute respiratory syndrome coronavirus 2
  REGION 1..16: note = Table B: HLA-DRB1*08:04L HLA-DRB1*03:01L HLA-DRB1*11:02L
DAMMFTSDLATNNLVV

SEQ ID NO: 20178 - protein, 12 aa, Severe acute respiratory syndrome coronavirus 2
  REGION 1..12: note = Table B: HLA-DRB1*08:04L HLA-DRB3*01:01L HLA-DPA1*01:03-B1*02:01L
LTNIFGTVYEKL

SEQ ID NO: 20179 - protein, 14 aa, Severe acute respiratory syndrome coronavirus 2
  REGION 1..14: note = Table B: HLA-DRB1*08:04L HLA-DRB1*08:01L
VYEKLKPVLDWLEE

SEQ ID NO: 20180 - protein, 15 aa, Severe acute respiratory syndrome coronavirus 2
  REGION 1..15: note = Table B: HLA-DRB1*08:04L HLA-DPA1*01:03-B1*04:02L
IKESVQTFFKLVNKF

SEQ ID NO: 20181 - protein, 13 aa, Severe acute respiratory syndrome coronavirus 2
  REGION 1..13: note = Table B: HLA-DRB1*08:04L HLA-DRB1*04:08L
DSIIIGGAKLKAL

SEQ ID NO: 20182 - protein, 12 aa, Severe acute respiratory syndrome coronavirus 2
  REGION 1..12: note = Table B: HLA-DRB1*08:04L HLA-DRB1*07:01L HLA-DRB1*08:03L
ETFVTHSKGLYR

SEQ ID NO: 20183 - protein, 13 aa, Severe acute respiratory syndrome coronavirus 2
  REGION 1..13: note = Table B: HLA-DRB1*08:04L HLA-DRB1*08:03L
GLYRKCVKSREET

SEQ ID NO: 20184 - protein, 13 aa, Severe acute respiratory syndrome coronavirus 2
  REGION 1..13: note = Table B: HLA-DRB1*08:04L HLA-DRB1*11:02L HLA-DRB1*11:03L HLA-DRB1*11:04L HLA-DRB1*14:02L HLA-DQA1*01:01-B1*05:01L HLA-DPA1*01:03-B1*04:01L HLA-DRB1*09:01L HLA-DRB1*12:02L HLA-DRB3*01:01L HLA-DRB1*07:01L HLA-DRB1*10:01L HLA-DRB1*08:03L
VIEVQGYKSVNIT

SEQ ID NO: 20185 - protein, 14 aa, Severe acute respiratory syndrome coronavirus 2
  REGION 1..14: note = Table B: HLA-DRB1*08:04L
VQGYKSVNITFELD

SEQ ID NO: 20186 - protein, 12 aa, Severe acute respiratory syndrome coronavirus 2
  REGION 1..12: note = Table B: HLA-DRB1*08:04L HLA-DPA1*01:03-B1*03:01L
ITFELDERIDKV

SEQ ID NO: 20187 - protein, 17 aa, Severe acute respiratory syndrome coronavirus 2
  REGION 1..17: note = Table B: HLA-DRB1*08:04L HLA-DPA1*03:01-B1*04:02L HLA-DRB1*11:02L HLA-DRB1*11:01L HLA-DPA1*01:03-B1*04:02L HLA-DPA1*01:03-B1*104:01L
LDERIDKVLNEKCSAYT

SEQ ID NO: 20188 - protein, 14 aa, Severe acute respiratory syndrome coronavirus 2
  REGION 1..14: note = Table B: HLA-DRB1*08:04L HLA-DQA1*01:01-B1*05:01L HLA-DRB1*04:08L
VVADAVIKTLQPVS

SEQ ID NO: 20189 - protein, 13 aa, Severe acute respiratory syndrome coronavirus 2
  REGION 1..13: note = Table B: HLA-DRB1*08:04L
ESGEFKLASHMYC

SEQ ID NO: 20190 - protein, 12 aa, Severe acute respiratory syndrome coronavirus 2
  REGION 1..12: note = Table B: HLA-DRB1*08:04L HLA-DRB1*08:01L
GEFKLASHMYCS

SEQ ID NO: 20191 - protein, 13 aa, Severe acute respiratory syndrome coronavirus 2
  REGION 1..13: note = Table B: HLA-DRB1*08:04L HLA-DRB1*11:04L HLA-DRB5*01:01L HLA-DRB1*04:10L HLA-DRB3*01:01L HLA-DRB1*07:01L HLA-DRB1*04:08L HLA-DRB1*08:03L
EEEFEPSTQYEYG

SEQ ID NO: 20192 - protein, 13 aa, Severe acute respiratory syndrome coronavirus 2
  REGION 1..13: note = Table B: HLA-DRB1*08:04L HLA-DRB1*14:17L HLA-DRB1*04:08L
VQTIEVNSFSGYL

SEQ ID NO: 20193 - protein, 12 aa, Severe acute respiratory syndrome coronavirus 2
  REGION 1..12: note = Table B: HLA-DRB1*08:04L HLA-DRB1*11:03L HLA-DRB1*14:17L HLA-DRB1*07:01L
PTVVVNAANVYL

SEQ ID NO: 20194 - protein, 12 aa, Severe acute respiratory syndrome coronavirus 2
  REGION 1..12: note = Table B: HLA-DRB1*08:04L
LAVFDKNLYDKL

SEQ ID NO: 20195 - protein, 14 aa, Severe acute respiratory syndrome coronavirus 2
  REGION 1..14: note = Table B: HLA-DRB1*08:04L
DKNLYDKLVSSFLE

SEQ ID NO: 20196 - protein, 11 aa, Severe acute respiratory syndrome coronavirus 2
  REGION 1..11: note = Table B: HLA-DRB1*08:04L HLA-DRB1*11:04L HLA-DRB1*11:01L HLA-DPA1*02:01-B1*13:01L HLA-DPA1*01:03-B1*104:01L HLA-DQA1*05:05-B1*03:01L
TLEETKFLTEN

SEQ ID NO: 20197 - protein, 12 aa, Severe acute respiratory syndrome coronavirus 2
  REGION 1..12: note = Table B: HLA-DRB1*08:04L HLA-DRB3*02:01L HLA-DPA1*02:01-B1*13:01L HLA-DQA1*05:05-B1*03:01L
LEETKFLTENLL

SEQ ID NO: 20198 - protein, 14 aa, Severe acute respiratory syndrome coronavirus 2
  REGION 1..14: note = Table B: HLA-DRB1*08:04L HLA-DPA1*01:03-B1*02:01L
ETKFLTENLLLYID

SEQ ID NO: 20199 - protein, 12 aa, Severe acute respiratory syndrome coronavirus 2
  REGION 1..12: note = Table B: HLA-DRB1*08:04L HLA-DPA1*01:03-B1*03:01L HLA-DRB1*11:03L HLA-DRB1*14:02L HLA-DRB1*08:01L HLA-DRB1*12:02L
YIDINGNLHPDS

SEQ ID NO: 20200 - protein, 13 aa, Severe acute respiratory syndrome coronavirus 2
  REGION 1..13: note = Table B: HLA-DRB1*08:04L HLA-DRB1*15:03L
DITFLKKDAPYIV

SEQ ID NO: 20201 - protein, 16 aa, Severe acute respiratory syndrome coronavirus 2
  REGION 1..16: note = Table B: HLA-DRB1*08:04L HLA-DRB1*11:01L HLA-DPA1*02:01-B1*13:01L
GTTEMLAKALRKVPTD

SEQ ID NO: 20202 - protein, 13 aa, Severe acute respiratory syndrome coronavirus 2
  REGION 1..13: note = Table B: HLA-DRB1*08:04L HLA-DRB1*11:02L HLA-DRB1*11:01L HLA-DPA1*01:03-B1*104:01L
DNYITTYPGQGLN

SEQ ID NO: 20203 - protein, 12 aa, Severe acute respiratory syndrome coronavirus 2
  REGION 1..12: note = Table B: HLA-DRB1*08:04L HLA-DPA1*01:03-B1*03:01L HLA-DRB1*11:02L HLA-DRB1*11:01L HLA-DPA1*01:03-B1*04:01L HLA-DPA1*01:03-B1*04:02L HLA-DRB3*01:01L HLA-DPA1*02:01-B1*13:01L
YITTYPGQGLNG

SEQ ID NO: 20204 - protein, 16 aa, Severe acute respiratory syndrome coronavirus 2
  REGION 1..16: note = Table B: HLA-DRB1*08:04L HLA-DRB1*08:77L HLA-DRB3*02:01L HLA-DRB1*14:01L HLA-DRB1*11:03L HLA-DRB1*11:04L HLA-DRB1*14:02L HLA-DPA1*01:03-B1*04:01L HLA-DRB1*09:01L HLA-DRB1*12:02L HLA-DRB3*01:01L HLA-DPA1*01:03-B1*02:01L HLA-DRB1*07:01L
  REGION 1..16: note = CONT. FROM ABOVE: HLA-DRB1*10:01L HLA-DRB1*08:03L HLA-DRB1*15:01 L
YPGQGLNGYTVEEAKT

SEQ ID NO: 20205 - protein, 13 aa, Severe acute respiratory syndrome coronavirus 2
  REGION 1..13: note = Table B: HLA-DRB1*08:04L
IQEGVVDYGARFY

SEQ ID NO: 20206 - protein, 11 aa, Severe acute respiratory syndrome coronavirus 2
  REGION 1..11: note = Table B: HLA-DRB1*08:04L HLA-DRB3*02:01L HLA-DQA1*01:01-B1*05:01L HLA-DRB1*11:01L HLA-DPA1*02:01-B1*13:01L HLA-DPA1*01:03-B1*104:01L HLA-DQA1*05:05-B1*03:01L HLA-DQA1*01:03-B1*06:01L
  REGION 1..11: note = CONT. FROM ABOVE: HLA-DRB1*08:03L
FYTSKTTVASL

SEQ ID NO: 20207 - protein, 13 aa, Severe acute respiratory syndrome coronavirus 2
  REGION 1..13: note = Table B: HLA-DRB1*08:04L HLA-DQA1*01:01-B1*05:01L HLA-DQA1*05:05-B1*03:19L HLA-DRB1*04:08L
VTMPLGYVTHGLN

SEQ ID NO: 20208 - protein, 13 aa, Severe acute respiratory syndrome coronavirus 2
  REGION 1..13: note = Table B: HLA-DRB1*08:04L
MPLGYVTHGLNLE

SEQ ID NO: 20209 - protein, 17 aa, Severe acute respiratory syndrome coronavirus 2
  REGION 1..17: note = Table B: HLA-DRB1*08:04L HLA-DRB3*02:01L
VPATVSVSSPDAVTAYN

SEQ ID NO: 20210 - protein, 14 aa, Severe acute respiratory syndrome coronavirus 2
  REGION 1..14: note = Table B: HLA-DRB1*08:04L HLA-DRB1*12:01L
YKDWSYSGQSTQLG

SEQ ID NO: 20211 - protein, 13 aa, Severe acute respiratory syndrome coronavirus 2
  REGION 1..13: note = Table B: HLA-DRB1*08:04L HLA-DPA1*01:03-B1*03:01L HLA-DRB1*09:01L HLA-DQA1*05:05-B1*03:01L HLA-DRB1*07:01L HLA-DRB1*04:08L
DKSVYYTSNPTTF

SEQ ID NO: 20212 - protein, 12 aa, Severe acute respiratory syndrome coronavirus 2
  REGION 1..12: note = Table B: HLA-DRB1*08:04L HLA-DRB1*11:03L HLA-DRB1*11:04L HLA-DQA1*01:01-B1*05:01L HLA-DRB1*12:02L HLA-DRB3*01:01L HLA-DRB1*15:01L
GEVITFDNLKTL

SEQ ID NO: 20213 - protein, 12 aa, Severe acute respiratory syndrome coronavirus 2
  REGION 1..12: note = Table B: HLA-DRB1*08:04L
ITFDNLKTLLSL

SEQ ID NO: 20214 - protein, 13 aa, Severe acute respiratory syndrome coronavirus 2
  REGION 1..13: note = Table B: HLA-DRB1*08:04L
TIKVFTTVDNINL

SEQ ID NO: 20215 - protein, 12 aa, Severe acute respiratory syndrome coronavirus 2
  REGION 1..12: note = Table B: HLA-DRB1*08:04L HLA-DRB1*08:01L
DNINLHTQVVDM

SEQ ID NO: 20216 - protein, 12 aa, Severe acute respiratory syndrome coronavirus 2
  REGION 1..12: note = Table B: HLA-DRB1*08:04L HLA-DRB3*02:01L HLA-DRB1*08:01L HLA-DQA1*05:05-B1*03:19L HLA-DRB3*01:01L HLA-DRB1*08:03L
NINLHTQVVDMS

SEQ ID NO: 20217 - protein, 12 aa, Severe acute respiratory syndrome coronavirus 2
  REGION 1..12: note = Table B: HLA-DRB1*08:04L HLA-DRB3*02:01L HLA-DRB1*14:02L HLA-DQA1*05:05-B1*03:19L HLA-DPA1*01:03-B1*04:01L HLA-DPA1*01:03-B1*04:02L
INLHTQVVDMSM

SEQ ID NO: 20218 - protein, 13 aa, Severe acute respiratory syndrome coronavirus 2
  REGION 1..13: note = Table B: HLA-DRB1*08:04L
AFEYYHTTDPSFL

SEQ ID NO: 20219 - protein, 12 aa, Severe acute respiratory syndrome coronavirus 2
  REGION 1..12: note = Table B: HLA-DRB1*08:04L HLA-DRB1*04:10L HLA-DRB1*14:54L
EYYHTTDPSFLG

SEQ ID NO: 20220 - protein, 15 aa, Severe acute respiratory syndrome coronavirus 2
  REGION 1..15: note = Table B: HLA-DRB1*08:04L
LTSIKWADNNCYLAT

SEQ ID NO: 20221 - protein, 13 aa, Severe acute respiratory syndrome coronavirus 2
  REGION 1..13: note = Table B: HLA-DRB1*08:04L HLA-DRB1*14:01L HLA-DRB1*08:01L HLA-DPA1*03:01-B1*105:01L HLA-DQA1*01:03-B1*06:01L
ILAYCNKTVGELG

SEQ ID NO: 20222 - protein, 12 aa, Severe acute respiratory syndrome coronavirus 2
  REGION 1..12: note = Table B: HLA-DRB1*08:04L HLA-DPA1*01:03-B1*04:02L HLA-DRB1*07:01L HLA-DRB1*10:01L HLA-DRB1*04:08L
KYLVQQESPFVM

SEQ ID NO: 20223 - protein, 16 aa, Severe acute respiratory syndrome coronavirus 2
  REGION 1..16: note = Table B: HLA-DRB1*08:04L HLA-DRB1*14:02L
TGNYQCGHYKHITSKE

SEQ ID NO: 20224 - protein, 13 aa, Severe acute respiratory syndrome coronavirus 2
  REGION 1..13: note = Table B: HLA-DRB1*08:04L HLA-DRB1*04:10L HLA-DPA1*02:01-B1*13:01L HLA-DRB1*04:08L HLA-DRB1*08:03L
TTTIKPVTYKLDG

SEQ ID NO: 20225 - protein, 18 aa, Severe acute respiratory syndrome coronavirus 2
  REGION 1..18: note = Table B: HLA-DRB1*08:04L HLA-DPA1*01:03-B1*03:01L HLA-DPA1*02:01-B1*13:01L
IKPVTYKLDGVVCTEIDP

SEQ ID NO: 20226 - protein, 15 aa, Severe acute respiratory syndrome coronavirus 2
  REGION 1..15: note = Table B: HLA-DRB1*08:04L HLA-DPA1*03:01-B1*04:02L HLA-DPA1*01:03-B1*04:02L
LDGVVCTEIDPKLDN

SEQ ID NO: 20227 - protein, 15 aa, Severe acute respiratory syndrome coronavirus 2
  REGION 1..15: note = Table B: HLA-DRB1*08:04L
NFKFVCDNIKFADDL

SEQ ID NO: 20228 - protein, 15 aa, Severe acute respiratory syndrome coronavirus 2
  REGION 1..15: note = Table B: HLA-DRB1*08:04L HLA-DPA1*02:01-B1*13:01L
FKFVCDNIKFADDLN

SEQ ID NO: 20229 - protein, 14 aa, Severe acute respiratory syndrome coronavirus 2
  REGION 1..14: note = Table B: HLA-DRB1*08:04L HLA-DPA1*01:03-B1*02:01L
RELKVTFFPDLNGD

SEQ ID NO: 20230 - protein, 13 aa, Severe acute respiratory syndrome coronavirus 2
  REGION 1..13: note = Table B: HLA-DRB1*08:04L HLA-DRB1*08:03L HLA-DRB1*15:03L
YKHYTPSFKKGAK

SEQ ID NO: 20231 - protein, 14 aa, Severe acute respiratory syndrome coronavirus 2
  REGION 1..14: note = Table B: HLA-DRB1*08:04L HLA-DRB1*08:01L HLA-DRB1*04:08L
LWSTKPVETSNSFD

SEQ ID NO: 20232 - protein, 13 aa, Severe acute respiratory syndrome coronavirus 2
  REGION 1..13: note = Table B: HLA-DRB1*08:04L HLA-DRB1*08:01L HLA-DPA1*01:03-B1*04:01L HLA-DPA1*01:03-B1*04:02L HLA-DRB3*01:01L HLA-DPA1*01:03-B1*104:01L HLA-DRB1*08:03L
FDVLKSEDAQGMD

SEQ ID NO: 20233 - protein, 14 aa, Severe acute respiratory syndrome coronavirus 2
  REGION 1..14: note = Table B: HLA-DRB1*08:04L HLA-DPA1*03:01-B1*105:01L HLA-DRB1*15:03L
KDVLECNVKTTEVV

SEQ ID NO: 20234 - protein, 15 aa, Severe acute respiratory syndrome coronavirus 2
  REGION 1..15: note = Table B: HLA-DRB1*08:04L
TTEVVGDIILKPANN

SEQ ID NO: 20235 - protein, 12 aa, Severe acute respiratory syndrome coronavirus 2
  REGION 1..12: note = Table B: HLA-DRB1*08:04L HLA-DRB1*11:03L HLA-DRB1*11:04L HLA-DRB1*04:10L HLA-DRB1*12:02L HLA-DQA1*05:05-B1*03:01L HLA-DRB1*04:08L HLA-DRB1*08:03L
GDIILKPANNSL

SEQ ID NO: 20236 - protein, 14 aa, Severe acute respiratory syndrome coronavirus 2
  REGION 1..14: note = Table B: HLA-DRB1*08:04L HLA-DRB3*02:01L
NNSLKITEEVGHTD

SEQ ID NO: 20237 - protein, 14 aa, Severe acute respiratory syndrome coronavirus 2
  REGION 1..14: note = Table B: HLA-DRB1*08:04L HLA-DRB1*08:01L HLA-DPA1*01:03-B1*04:02L HLA-DPA1*01:02-B1*04:01L
HTDLMAAYVDNSSL

SEQ ID NO: 20238 - protein, 15 aa, Severe acute respiratory syndrome coronavirus 2
  REGION 1..15: note = Table B: HLA-DRB1*08:04L HLA-DPA1*01:03-B1*104:01L
NSRIKASMPTTIAKN

SEQ ID NO: 20239 - protein, 14 aa, Severe acute respiratory syndrome coronavirus 2
  REGION 1..14: note = Table B: HLA-DRB1*08:04L HLA-DRB1*08:77L HLA-DRB1*11:03L HLA-DRB1*09:01L HLA-DRB3*01:01L HLA-DRB1*07:01L HLA-DRB1*04:08L
MPTTIAKNTVKSVG

SEQ ID NO: 20240 - protein, 14 aa, Severe acute respiratory syndrome coronavirus 2
  REGION 1..14: note = Table B: HLA-DRB1*08:04L HLA-DPA1*01:03-B1*02:01L HLA-DPA1*01:03-B1*104:01L
FNYLKSPNFSKLIN

SEQ ID NO: 20241 - protein, 13 aa, Severe acute respiratory syndrome coronavirus 2
  REGION 1..13: note = Table B: HLA-DRB1*08:04L HLA-DRB1*08:01L HLA-DRB1*11:01L HLA-DQA1*01-B1*05L HLA-DQA1*05:01-B1*02:01L HLA-DPA1*02:01-B1*13:01L HLA-DPA1*01:03-B1*104:01L HLA-DQA1*01:03-B1*06:01L
SFKWDLTAFGLVA

SEQ ID NO: 20242 - protein, 12 aa, Severe acute respiratory syndrome coronavirus 2
  REGION 1..12: note = Table B: HLA-DRB1*08:04L HLA-DRB1*04:08L
YFAVHFISNSWL

SEQ ID NO: 20243 - protein, 12 aa, Severe acute respiratory syndrome coronavirus 2
  REGION 1..12: note = Table B: HLA-DRB1*08:04L HLA-DRB1*12:01L
APISAMVRMYIF

SEQ ID NO: 20244 - protein, 15 aa, Severe acute respiratory syndrome coronavirus 2
  REGION 1..15: note = Table B: HLA-DRB1*08:04L
WKSYVHVVDGCNSST

SEQ ID NO: 20245 - protein, 13 aa, Severe acute respiratory syndrome coronavirus 2
  REGION 1..13: note = Table B: HLA-DRB1*08:04L HLA-DRB1*11:03L HLA-DRB3*01:01L
ISDEVARDLSLQF

SEQ ID NO: 20246 - protein, 14 aa, Severe acute respiratory syndrome coronavirus 2
  REGION 1..14: note = Table B: HLA-DRB1*08:04L
IHLYFDKAGQKTYE

SEQ ID NO: 20247 - protein, 16 aa, Severe acute respiratory syndrome coronavirus 2
  REGION 1..16: note = Table B: HLA-DRB1*08:04L HLA-DPA1*01:03-B1*03:01L
AGQKTYERHSLSHFVN

SEQ ID NO: 20248 - protein, 18 aa, Severe acute respiratory syndrome coronavirus 2
  REGION 1..18: note = Table B: HLA-DRB1*08:04L HLA-DPA1*03:01-B1*04:02L HLA-DRB1*14:02L HLA-DQA1*05:05-B1*03:19L HLA-DQA1*05:01-B1*02:01L HLA-DPA1*01:03-B1*04:02L HLA-DPA1*01:03-B1*104:01L
GQKTYERHSLSHFVNLDN

SEQ ID NO: 20249 - protein, 14 aa, Severe acute respiratory syndrome coronavirus 2
  REGION 1..14: note = Table B: HLA-DRB1*08:04L
DSAEVAVKMFDAYV

SEQ ID NO: 20250 - protein, 14 aa, Severe acute respiratory syndrome coronavirus 2
  REGION 1..14: note = Table B: HLA-DRB1*08:04L
AEVAVKMFDAYVNT

SEQ ID NO: 20251 - protein, 14 aa, Severe acute respiratory syndrome coronavirus 2
  REGION 1..14: note = Table B: HLA-DRB1*08:04L HLA-DRB1*15:01L
VAVKMFDAYVNTFS

SEQ ID NO: 20252 - protein, 13 aa, Severe acute respiratory syndrome coronavirus 2
  REGION 1..13: note = Table B: HLA-DRB1*08:04L HLA-DRB1*08:01L HLA-DPA1*01:03-B1*04:02L HLA-DPA1*01:03-B1*104:01L
FDAYVNTFSSTFN

SEQ ID NO: 20253 - protein, 13 aa, Severe acute respiratory syndrome coronavirus 2
  REGION 1..13: note = Table B: HLA-DRB1*08:04L HLA-DRB1*10:01L
VATAEAELAKNVS

SEQ ID NO: 20254 - protein, 12 aa, Severe acute respiratory syndrome coronavirus 2
  REGION 1..12: note = Table B: HLA-DRB1*08:04L HLA-DRB1*14:54L
LSTFISAARQGF

SEQ ID NO: 20255 - protein, 15 aa, Severe acute respiratory syndrome coronavirus 2
  REGION 1..15: note = Table B: HLA-DRB1*08:04L HLA-DRB1*14:01L
VDSDVETKDVVECLK

SEQ ID NO: 20256 - protein, 13 aa, Severe acute respiratory syndrome coronavirus 2
  REGION 1..13: note = Table B: HLA-DRB1*08:04L HLA-DRB1*11:04L HLA-DRB1*11:01L HLA-DRB1*04:08L
KDVVECLKLSHQS

SEQ ID NO: 20257 - protein, 13 aa, Severe acute respiratory syndrome coronavirus 2
  REGION 1..13: note = Table B: HLA-DRB1*08:04L HLA-DRB1*14:01L HLA-DRB1*08:01L HLA-DPA1*03:01-B1*105:01L HLA-DRB1*04:08L
DVVECLKLSHQSD

SEQ ID NO: 20258 - protein, 16 aa, Severe acute respiratory syndrome coronavirus 2
  REGION 1..16: note = Table B: HLA-DRB1*08:04L
INAQVAKSHNIALIWN

SEQ ID NO: 20259 - protein, 13 aa, Severe acute respiratory syndrome coronavirus 2
  REGION 1..13: note = Table B: HLA-DRB1*08:04L HLA-DPA1*01:03-B1*02:01L
ALIWNVKDFMSLS

SEQ ID NO: 20260 - protein, 14 aa, Severe acute respiratory syndrome coronavirus 2
  REGION 1..14: note = Table B: HLA-DRB1*08:04L HLA-DQA1*05:05-B1*03:01L
VVNVVTTKIALKGG

SEQ ID NO: 20261 - protein, 15 aa, Severe acute respiratory syndrome coronavirus 2
  REGION 1..15: note = Table B: HLA-DRB1*08:04L
VNVVTTKIALKGGKI

SEQ ID NO: 20262 - protein, 13 aa, Severe acute respiratory syndrome coronavirus 2
  REGION 1..13: note = Table B: HLA-DRB1*08:04L HLA-DQA1*05:05-B1*03:01L
VAAIFYLITPVHV

SEQ ID NO: 20263 - protein, 13 aa, Severe acute respiratory syndrome coronavirus 2
  REGION 1..13: note = Table B: HLA-DRB1*08:04L HLA-DPA1*02:01-B1*13:01L HLA-DPA1*01:02-B1*04:01L
SSEIIGYKAIDGG

SEQ ID NO: 20264 - protein, 13 aa, Severe acute respiratory syndrome coronavirus 2
  REGION 1..13: note = Table B: HLA-DRB1*08:04L HLA-DRB1*11:02L HLA-DRB1*11:03L HLA-DRB1*14:17L HLA-DRB1*04:08L
DFDTWFSQRGGSY

SEQ ID NO: 20265 - protein, 12 aa, Severe acute respiratory syndrome coronavirus 2
  REGION 1..12: note = Table B: HLA-DRB1*08:04L HLA-DPA1*03:01-B1*04:02L HLA-DRB1*14:01L HLA-DRB1*08:01L HLA-DRB1*12:01L HLA-DRB1*04:08L
GDFLHFLPRVFS

SEQ ID NO: 20266 - protein, 12 aa, Severe acute respiratory syndrome coronavirus 2
  REGION 1..12: note = Table B: HLA-DRB1*08:04L HLA-DRB1*11:04L HLA-DRB1*08:01L HLA-DRB1*11:01L HLA-DRB1*04:08L
DFLHFLPRVFSA

SEQ ID NO: 20267 - protein, 15 aa, Severe acute respiratory syndrome coronavirus 2
  REGION 1..15: note = Table B: HLA-DRB1*08:04L
GNICYTPSKLIEYTD

SEQ ID NO: 20268 - protein, 14 aa, Severe acute respiratory syndrome coronavirus 2
  REGION 1..14: note = Table B: HLA-DRB1*08:04L HLA-DPA1*01:03-B1*03:01L HLA-DRB1*14:02L HLA-DPA1*01:03-B1*04:01L HLA-DPA1*01:03-B1*02:01L HLA-DPA1*01:03-B1*104:01L HLA-DRB1*07:01L HLA-DRB1*08:03L
IIQFPNTYLEGSVR

SEQ ID NO: 20269 - protein, 14 aa, Severe acute respiratory syndrome coronavirus 2
  REGION 1..14: note = Table B: HLA-DRB1*08:04L HLA-DRB3*02:01L HLA-DRB1*14:01L HLA-DRB1*04:10L HLA-DRB1*09:01L HLA-DRB1*07:01L
FPNTYLEGSVRVVT

SEQ ID NO: 20270 - protein, 13 aa, Severe acute respiratory syndrome coronavirus 2
  REGION 1..13: note = Table B: HLA-DRB1*08:04L HLA-DQA1*01:01-B1*05:01L HLA-DRB1*08:01L HLA-DRB1*09:01L HLA-DRB3*01:01L HLA-DPA1*01:03-B1*02:01L HLA-DRB1*07:01L HLA-DRB1*08:03L
GSVRVVTTFDSEY

SEQ ID NO: 20271 - protein, 13 aa, Severe acute respiratory syndrome coronavirus 2
  REGION 1..13: note = Table B: HLA-DRB1*08:04L HLA-DRB1*04:08L
LNNDYYRSLPGVF

SEQ ID NO: 20272 - protein, 12 aa, Severe acute respiratory syndrome coronavirus 2
  REGION 1..12: note = Table B: HLA-DRB1*08:04L HLA-DPA1*01:02-B1*04:01L
YFSGAMDTTSYR

SEQ ID NO: 20273 - protein, 13 aa, Severe acute respiratory syndrome coronavirus 2
  REGION 1..13: note = Table B: HLA-DRB1*08:04L HLA-DRB3*02:01L HLA-DRB1*11:03L HLA-DRB1*12:02L HLA-DPA1*02:01-B1*13:01L HLA-DRB1*07:01L
FSGAMDTTSYREA

SEQ ID NO: 20274 - protein, 13 aa, Severe acute respiratory syndrome coronavirus 2
  REGION 1..13: note = Table B: HLA-DRB1*08:04L HLA-DRB1*08:01L
SGAMDTTSYREAA

SEQ ID NO: 20275 - protein, 14 aa, Severe acute respiratory syndrome coronavirus 2
  REGION 1..14: note = Table B: HLA-DRB1*08:04L HLA-DRB1*11:03L HLA-DRB1*11:04L HLA-DQA1*01:01-B1*05:01L
GSDVLYQPPQTSIT

SEQ ID NO: 20276 - protein, 13 aa, Severe acute respiratory syndrome coronavirus 2
  REGION 1..13: note = Table B: HLA-DRB1*08:04L HLA-DRB1*11:04L HLA-DRB1*11:01L
DDVVYCPRHVICT

SEQ ID NO: 20277 - protein, 13 aa, Severe acute respiratory syndrome coronavirus 2
  REGION 1..13: note = Table B: HLA-DRB1*08:04L HLA-DRB1*11:01L HLA-DRB3*01:01L
HNFLVQAGNVQLR

SEQ ID NO: 20278 - protein, 16 aa, Severe acute respiratory syndrome coronavirus 2
  REGION 1..16: note = Table B: HLA-DRB1*08:04L HLA-DRB1*14:02L HLA-DRB1*07:01L HLA-DRB1*08:03L
EGNFYGPFVDRQTAQA

SEQ ID NO: 20279 - protein, 13 aa, Severe acute respiratory syndrome coronavirus 2
  REGION 1..13: note = Table B: HLA-DRB1*08:04L
YGPFVDRQTAQAA

SEQ ID NO: 20280 - protein, 15 aa, Severe acute respiratory syndrome coronavirus 2
  REGION 1..15: note = Table B: HLA-DRB1*08:04L HLA-DPA1*01:03-B1*03:01L HLA-DPA1*01:03-B1*04:01L HLA-DPA1*01:03-B1*04:02L HLA-DPA1*02:01-B1*13:01L
AAVINGDRWFLNRFT

SEQ ID NO: 20281 - protein, 14 aa, Severe acute respiratory syndrome coronavirus 2
  REGION 1..14: note = Table B: HLA-DRB1*08:04L HLA-DRB1*14:02L HLA-DRB1*08:01L
WFLNRFTTTLNDFN

SEQ ID NO: 20282 - protein, 14 aa, Severe acute respiratory syndrome coronavirus 2
  REGION 1..14: note = Table B: HLA-DRB1*08:04L HLA-DPA1*01:03-B1*02:01L HLA-DRB1*08:02L
TLVYKVYYGNALDQ

SEQ ID NO: 20283 - protein, 13 aa, Severe acute respiratory syndrome coronavirus 2
  REGION 1..13: note = Table B: HLA-DRB1*08:04L HLA-DPA1*01:03-B1*04:01L HLA-DPA1*01:03-B1*04:02L HLA-DRB1*12:02L HLA-DRB1*14:54L HLA-DPA1*01:03-B1*104:01L
VYKVYYGNALDQA

SEQ ID NO: 20284 - protein, 12 aa, Severe acute respiratory syndrome coronavirus 2
  REGION 1..12: note = Table B: HLA-DRB1*08:04L HLA-DRB1*08:01L HLA-DRB1*12:02L HLA-DRB1*14:54L
TTVMFLARGIVF

SEQ ID NO: 20285 - protein, 15 aa, Severe acute respiratory syndrome coronavirus 2
  REGION 1..15: note = Table B: HLA-DRB1*08:04L HLA-DPA1*03:01-B1*04:02L HLA-DPA1*01:03-B1*04:02L HLA-DPA1*01:03-B1*02:01L HLA-DPA1*01:02-B1*04:01L HLA-DQA1*01:03-B1*06:01L
RLTLGVYDYLVSTQE

SEQ ID NO: 20286 - protein, 11 aa, Severe acute respiratory syndrome coronavirus 2
  REGION 1..11: note = Table B: HLA-DRB1*08:04L HLA-DRB1*14:01L
FKLNIKLLGVG

SEQ ID NO: 20287 - protein, 13 aa, Severe acute respiratory syndrome coronavirus 2
  REGION 1..13: note = Table B: HLA-DRB1*08:04L HLA-DPA1*01:03-B1*03:01L HLA-DQA1*05:05-B1*03:19L HLA-DRB1*04:10L HLA-DRB1*10:01L
TSVVLLSVLQQLR

SEQ ID NO: 20288 - protein, 14 aa, Severe acute respiratory syndrome coronavirus 2
  REGION 1..14: note = Table B: HLA-DRB1*08:04L
SVVLLSVLQQLRVE

SEQ ID NO: 20289 - protein, 15 aa, Severe acute respiratory syndrome coronavirus 2
  REGION 1..15: note = Table B: HLA-DRB1*08:04L HLA-DRB1*03:01L HLA-DRB1*11:02L HLA-DRB1*09:01L HLA-DPA1*01:03-B1*04:02L HLA-DPA1*01:03-B1*104:01L HLA-DRB1*08:02L HLA-DRB1*08:03L
LQQLRVESSSKLWAQ

SEQ ID NO: 20290 - protein, 13 aa, Severe acute respiratory syndrome coronavirus 2
  REGION 1..13: note = Table B: HLA-DRB1*08:04L HLA-DPA1*03:01-B1*105:01L
SKLWAQCVQLHND

SEQ ID NO: 20291 - protein, 14 aa, Severe acute respiratory syndrome coronavirus 2
  REGION 1..14: note = Table B: HLA-DRB1*08:04L
KLWAQCVQLHNDIL

SEQ ID NO: 20292 - protein, 14 aa, Severe acute respiratory syndrome coronavirus 2
  REGION 1..14: note = Table B: HLA-DRB1*08:04L
EMLDNRATLQAIAS

SEQ ID NO: 20293 - protein, 14 aa, Severe acute respiratory syndrome coronavirus 2
  REGION 1..14: note = Table B: HLA-DRB1*08:04L
KSLNVAKSEFDRDA

SEQ ID NO: 20294 - protein, 14 aa, Severe acute respiratory syndrome coronavirus 2
  REGION 1..14: note = Table B: HLA-DRB1*08:04L HLA-DRB1*08:03L HLA-DRB1*15:01L
QRKLEKMADQAMTQ

SEQ ID NO: 20295 - protein, 12 aa, Severe acute respiratory syndrome coronavirus 2
  REGION 1..12: note = Table B: HLA-DRB1*08:04L HLA-DRB1*14:01L HLA-DRB1*16:01L HLA-DRB1*15:03L
FTMLRKLDNDAL

SEQ ID NO: 20296 - protein, 13 aa, Severe acute respiratory syndrome coronavirus 2
  REGION 1..13: note = Table B: HLA-DRB1*08:04L HLA-DRB1*08:77L HLA-DPA1*01:03-B1*03:01L HLA-DRB1*11:03L HLA-DPA1*02:01-B1*13:01L HLA-DRB1*07:01L HLA-DRB1*10:01L
DALNNIINNARDG

SEQ ID NO: 20297 - protein, 15 aa, Severe acute respiratory syndrome coronavirus 2
  REGION 1..15: note = Table B: HLA-DRB1*08:04L
IIPLTTAAKLMVVIP

SEQ ID NO: 20298 - protein, 12 aa, Severe acute respiratory syndrome coronavirus 2
  REGION 1..12: note = Table B: HLA-DRB1*08:04L HLA-DRB3*02:01L HLA-DRB1*11:03L HLA-DRB1*11:04L HLA-DRB1*12:02L HLA-DRB3*01:01L
MVVIPDYNTYKN

SEQ ID NO: 20299 - protein, 12 aa, Severe acute respiratory syndrome coronavirus 2
  REGION 1..12: note = Table B: HLA-DRB1*08:04L HLA-DRB1*11:03L
VTALRANSAVKL

SEQ ID NO: 20300 - protein, 13 aa, Severe acute respiratory syndrome coronavirus 2
  REGION 1..13: note = Table B: HLA-DRB1*08:04L HLA-DRB1*11:04L HLA-DQA1*05:05-B1*03:01L HLA-DRB1*10:01L HLA-DRB1*08:03L
NSAVKLQNNELSP

SEQ ID NO: 20301 - protein, 13 aa, Severe acute respiratory syndrome coronavirus 2
  REGION 1..13: note = Table B: HLA-DRB1*08:04L HLA-DPA1*03:01-B1*04:02L HLA-DRB1*11:03L HLA-DRB1*10:01L HLA-DRB1*15:01L
DNALAYYNTTKGG

SEQ ID NO: 20302 - protein, 11 aa, Severe acute respiratory syndrome coronavirus 2
  REGION 1..11: note = Table B: HLA-DRB1*08:04L HLA-DRB1*11:04L HLA-DRB1*09:01L HLA-DRB1*12:02L HLA-DRB3*01:01L HLA-DRB1*14:54L HLA-DPA1*01:03-B1*104:01L
YYNTTKGGRFV

SEQ ID NO: 20303 - protein, 14 aa, Severe acute respiratory syndrome coronavirus 2
  REGION 1..14: note = Table B: HLA-DRB1*08:04L
GGRFVLALLSDLQD

SEQ ID NO: 20304 - protein, 14 aa, Severe acute respiratory syndrome coronavirus 2
  REGION 1..14: note = Table B: HLA-DRB1*08:04L HLA-DPA1*01:03-B1*03:01L HLA-DQA1*01-B1*05L HLA-DQA1*05:01-B1*02:01L HLA-DRB3*01:01L HLA-DQA1*05:05-B1*03:01L
DLQDLKWARFPKSD

SEQ ID NO: 20305 - protein, 12 aa, Severe acute respiratory syndrome coronavirus 2
  REGION 1..12: note = Table B: HLA-DRB1*08:04L HLA-DRB3*01:01L HLA-DQA1*05:05-B1*03:01L
YFIKGLNNLNRG

SEQ ID NO: 20306 - protein, 13 aa, Severe acute respiratory syndrome coronavirus 2
  REGION 1..13: note = Table B: HLA-DRB1*08:04L
VLGSLAATVRLQA

SEQ ID NO: 20307 - protein, 14 aa, Severe acute respiratory syndrome coronavirus 2
  REGION 1..14: note = Table B: HLA-DRB1*08:04L
VLSFCAFAVDAAKA

SEQ ID NO: 20308 - protein, 17 aa, Severe acute respiratory syndrome coronavirus 2
  REGION 1..17: note = Table B: HLA-DRB1*08:04L HLA-DRB1*11:04L HLA-DPA1*01:03-B1*02:01L
VDAAKAYKDYLASGGQP

SEQ ID NO: 20309 - protein, 13 aa, Severe acute respiratory syndrome coronavirus 2
  REGION 1..13: note = Table B: HLA-DRB1*08:04L HLA-DRB1*14:01L
GQPITNCVKMLCT

SEQ ID NO: 20310 - protein, 13 aa, Severe acute respiratory syndrome coronavirus 2
  REGION 1..13: note = Table B: HLA-DRB1*08:04L HLA-DRB1*08:01L
DPVGFTLKNTVCT

SEQ ID NO: 20311 - protein, 13 aa, Severe acute respiratory syndrome coronavirus 2
  REGION 1..13: note = Table B: HLA-DRB1*08:04L HLA-DRB1*11:03L HLA-DRB1*12:02L
YRAFDIYNDKVAG

SEQ ID NO: 20312 - protein, 14 aa, Severe acute respiratory syndrome coronavirus 2
  REGION 1..14: note = Table B: HLA-DRB1*08:04L
RHTFSNYQHEETIY

SEQ ID NO: 20313 - protein, 13 aa, Severe acute respiratory syndrome coronavirus 2
  REGION 1..13: note = Table B: HLA-DRB1*08:04L HLA-DRB1*08:03L
FFKFRIDGDMVPH

SEQ ID NO: 20314 - protein, 12 aa, Severe acute respiratory syndrome coronavirus 2
  REGION 1..12: note = Table B: HLA-DRB1*08:04L HLA-DPA1*01:03-B1*03:01L HLA-DRB1*03:01L HLA-DRB1*14:02L HLA-DPA1*03:01-B1*105:01L
FRIDGDMVPHIS

SEQ ID NO: 20315 - protein, 17 aa, Severe acute respiratory syndrome coronavirus 2
  REGION 1..17: note = Table B: HLA-DRB1*08:04L
DTLKEILVTYNCCDDDY

SEQ ID NO: 20316 - protein, 12 aa, Severe acute respiratory syndrome coronavirus 2
  REGION 1..12: note = Table B: HLA-DRB1*08:04L HLA-DRB1*08:01L HLA-DRB1*08:03L
DDYFNKKDWYDF

SEQ ID NO: 20317 - protein, 13 aa, Severe acute respiratory syndrome coronavirus 2
  REGION 1..13: note = Table B: HLA-DRB1*08:04L HLA-DRB1*08:01L
DYFNKKDWYDFVE

SEQ ID NO: 20318 - protein, 13 aa, Severe acute respiratory syndrome coronavirus 2
  REGION 1..13: note = Table B: HLA-DRB1*08:04L HLA-DRB1*11:03L HLA-DPA1*01:03-B1*04:01L HLA-DRB1*09:01L HLA-DPA1*01:03-B1*104:01L HLA-DRB1*07:01L
DWYDFVENPDILR

SEQ ID NO: 20319 - protein, 14 aa, Severe acute respiratory syndrome coronavirus 2
  REGION 1..14: note = Table B: HLA-DRB1*08:04L
WYDFVENPDILRVY

SEQ ID NO: 20320 - protein, 14 aa, Severe acute respiratory syndrome coronavirus 2
  REGION 1..14: note = Table B: HLA-DRB1*08:04L
YDFVENPDILRVYA

SEQ ID NO: 20321 - protein, 14 aa, Severe acute respiratory syndrome coronavirus 2
  REGION 1..14: note = Table B: HLA-DRB1*08:04L HLA-DRB1*04:08L
DFVENPDILRVYAN

SEQ ID NO: 20322 - protein, 15 aa, Severe acute respiratory syndrome coronavirus 2
  REGION 1..15: note = Table B: HLA-DRB1*08:04L HLA-DRB1*08:01L
TVQFCDAMRNAGIVG

SEQ ID NO: 20323 - protein, 14 aa, Severe acute respiratory syndrome coronavirus 2
  REGION 1..14: note = Table B: HLA-DRB1*08:04L HLA-DPA1*01:03-B1*04:01L HLA-DPA1*01:03-B1*04:02L HLA-DPA1*02:01-B1*13:01L HLA-DPA1*01:03-B1*104:01L
FGDFIQTTPGSGVP

SEQ ID NO: 20324 - protein, 12 aa, Severe acute respiratory syndrome coronavirus 2
  REGION 1..12: note = Table B: HLA-DRB1*08:04L HLA-DRB3*01:01L
ESHVDTDLTKPY

SEQ ID NO: 20325 - protein, 13 aa, Severe acute respiratory syndrome coronavirus 2
  REGION 1..13: note = Table B: HLA-DRB1*08:04L HLA-DRB1*13:01L
SHVDTDLTKPYIK

SEQ ID NO: 20326 - protein, 16 aa, Severe acute respiratory syndrome coronavirus 2
  REGION 1..16: note = Table B: HLA-DRB1*08:04L HLA-DRB1*13:01L
TEERLKLFDRYFKYWD

SEQ ID NO: 20327 - protein, 16 aa, Severe acute respiratory syndrome coronavirus 2
  REGION 1..16: note = Table B: HLA-DRB1*08:04L HLA-DRB1*14:01L HLA-DRB1*08:01L HLA-DRB1*15:03L
FPPTSFGPLVRKIFVD

SEQ ID NO: 20328 - protein, 13 aa, Severe acute respiratory syndrome coronavirus 2
  REGION 1..13: note = Table B: HLA-DRB1*08:04L HLA-DRB1*08:77L HLA-DRB3*02:01L HLA-DPA1*01:03-B1*03:01L HLA-DRB1*03:01L HLA-DRB1*11:04L HLA-DRB1*08:01L
VRKIFVDGVPFVV

SEQ ID NO: 20329 - protein, 11 aa, Severe acute respiratory syndrome coronavirus 2
  REGION 1..11: note = Table B: HLA-DRB1*08:04L HLA-DPA1*01:03-B1*03:01L HLA-DRB1*11:04L HLA-DRB1*12:02L HLA-DRB3*01:01L HLA-DRB1*10:01L
LVYAADPAMHA

SEQ ID NO: 20330 - protein, 12 aa, Severe acute respiratory syndrome coronavirus 2
  REGION 1..12: note = Table B: HLA-DRB1*08:04L HLA-DRB1*09:01L HLA-DRB1*12:02L
NVAFQTVKPGNF

SEQ ID NO: 20331 - protein, 12 aa, Severe acute respiratory syndrome coronavirus 2
  REGION 1..12: note = Table B: HLA-DRB1*08:04L HLA-DRB1*11:01L HLA-DRB5*01:01L HLA-DRB1*09:01L HLA-DRB3*01:01L HLA-DRB1*08:03L
VAFQTVKPGNFN

SEQ ID NO: 20332 - protein, 16 aa, Severe acute respiratory syndrome coronavirus 2
  REGION 1..16: note = Table B: HLA-DRB1*08:04L HLA-DPA1*01:03-B1*04:01L
PGNFNKDFYDFAVSKG

SEQ ID NO: 20333 - protein, 13 aa, Severe acute respiratory syndrome coronavirus 2
  REGION 1..13: note = Table B: HLA-DRB1*08:04L HLA-DRB1*04:08L
NAAISDYDYYRYN

SEQ ID NO: 20334 - protein, 14 aa, Severe acute respiratory syndrome coronavirus 2
  REGION 1..14: note = Table B: HLA-DRB1*08:04L
VVEVVDKYFDCYDG

SEQ ID NO: 20335 - protein, 11 aa, Severe acute respiratory syndrome coronavirus 2
  REGION 1..11: note = Table B: HLA-DRB1*08:04L HLA-DRB1*08:03L
KYAISAKNRAR

SEQ ID NO: 20336 - protein, 11 aa, Severe acute respiratory syndrome coronavirus 2
  REGION 1..11: note = Table B: HLA-DRB1*08:04L HLA-DRB1*11:03L HLA-DRB1*15:03L
YAISAKNRART

SEQ ID NO: 20337 - protein, 14 aa, Severe acute respiratory syndrome coronavirus 2
  REGION 1..14: note = Table B: HLA-DRB1*08:04L HLA-DRB1*11:04L HLA-DRB1*08:01L
GVSICSTMTNRQFH

SEQ ID NO: 20338 - protein, 12 aa, Severe acute respiratory syndrome coronavirus 2
  REGION 1..12: note = Table B: HLA-DRB1*08:04L
TVVIGTSKFYGG

SEQ ID NO: 20339 - protein, 12 aa, Severe acute respiratory syndrome coronavirus 2
  REGION 1..12: note = Table B: HLA-DRB1*08:04L HLA-DRB1*14:01L HLA-DRB1*08:01L
GGWHNMLKTVYS

SEQ ID NO: 20340 - protein, 11 aa, Severe acute respiratory syndrome coronavirus 2
  REGION 1..11: note = Table B: HLA-DRB1*08:04L HLA-DRB1*13:01L HLA-DRB3*01:01L HLA-DRB1*15:01L
TVYSDVENPHL

SEQ ID NO: 20341 - protein, 15 aa, Severe acute respiratory syndrome coronavirus 2
  REGION 1..15: note = Table B: HLA-DRB1*08:04L HLA-DPA1*01:03-B1*04:02L HLA-DRB1*10:01L
SHRFYRLANECAQVL

SEQ ID NO: 20342 - protein, 14 aa, Severe acute respiratory syndrome coronavirus 2
  REGION 1..14: note = Table B: HLA-DRB1*08:04L HLA-DRB1*14:01L
ATTAYANSVFNICQ

SEQ ID NO: 20343 - protein, 12 aa, Severe acute respiratory syndrome coronavirus 2
  REGION 1..12: note = Table B: HLA-DRB1*08:04L HLA-DRB1*13:01L HLA-DRB1*07:01L
KYVRNLQHRLYE

SEQ ID NO: 20344 - protein, 12 aa, Severe acute respiratory syndrome coronavirus 2
  REGION 1..12: note = Table B: HLA-DRB1*08:04L HLA-DRB1*04:08L
YECLYRNRDVDT

SEQ ID NO: 20345 - protein, 14 aa, Severe acute respiratory syndrome coronavirus 2
  REGION 1..14: note = Table B: HLA-DRB1*08:04L
CLYRNRDVDTDFVN

SEQ ID NO: 20346 - protein, 13 aa, Severe acute respiratory syndrome coronavirus 2
  REGION 1..13: note = Table B: HLA-DRB1*08:04L HLA-DRB1*04:08L
RDVDTDFVNEFYA

SEQ ID NO: 20347 - protein, 12 aa, Severe acute respiratory syndrome coronavirus 2
  REGION 1..12: note = Table B: HLA-DRB1*08:04L
FYAYLRKHFSMM

SEQ ID NO: 20348 - protein, 16 aa, Severe acute respiratory syndrome coronavirus 2
  REGION 1..16: note = Table B: HLA-DRB1*08:04L HLA-DPA1*01:03-B1*04:02L
YAYLRKHFSMMILSDD

SEQ ID NO: 20349 - protein, 13 aa, Severe acute respiratory syndrome coronavirus 2
  REGION 1..13: note = Table B: HLA-DRB1*08:04L HLA-DRB1*07:01L
SIKNFKSVLYYQN

SEQ ID NO: 20350 - protein, 17 aa, Severe acute respiratory syndrome coronavirus 2
  REGION 1..17: note = Table B: HLA-DRB1*08:04L HLA-DPA1*01:03-B1*04:02L HLA-DRB1*12:01L
PHEFCSQHTMLVKQGDD

SEQ ID NO: 20351 - protein, 15 aa, Severe acute respiratory syndrome coronavirus 2
  REGION 1..15: note = Table B: HLA-DRB1*08:04L
SQHTMLVKQGDDYVY

SEQ ID NO: 20352 - protein, 12 aa, Severe acute respiratory syndrome coronavirus 2
  REGION 1..12: note = Table B: HLA-DRB1*08:04L HLA-DPA1*01:03-B1*03:01L HLA-DPA1*03:01-B1*04:02L HLA-DQA1*01:01-B1*05:01L HLA-DQA1*05:05-B1*03:19L HLA-DPA1*01:03-B1*04:01L HLA-DPA1*02:01-B1*13:01L HLA-DRB1*10:01L HLA-DRB1*08:03L
DYVYLPYPDPSR

SEQ ID NO: 20353 - protein, 13 aa, Severe acute respiratory syndrome coronavirus 2
  REGION 1..13: note = Table B: HLA-DRB1*08:04L HLA-DRB1*11:03L HLA-DRB1*11:04L
VYLPYPDPSRILG

SEQ ID NO: 20354 - protein, 15 aa, Severe acute respiratory syndrome coronavirus 2
  REGION 1..15: note = Table B: HLA-DRB1*08:04L
GAGCFVDDIVKTDGT

SEQ ID NO: 20355 - protein, 15 aa, Severe acute respiratory syndrome coronavirus 2
  REGION 1..15: note = Table B: HLA-DRB1*08:04L HLA-DPA1*03:01-B1*04:02L HLA-DPA1*01:03-B1*04:02L HLA-DPA1*02:01-B1*13:01L
AGCFVDDIVKTDGTL

SEQ ID NO: 20356 - protein, 11 aa, Severe acute respiratory syndrome coronavirus 2
  REGION 1..11: note = Table B: HLA-DRB1*08:04L HLA-DPA1*01:03-B1*03:01L HLA-DRB1*14:02L HLA-DRB1*04:10L HLA-DRB3*01:01L HLA-DRB1*04:08L
DDIVKTDGTLM

SEQ ID NO: 20357 - protein, 15 aa, Severe acute respiratory syndrome coronavirus 2
  REGION 1..15: note = Table B: HLA-DRB1*08:04L HLA-DPA1*01:03-B1*03:01L HLA-DRB1*03:01L HLA-DRB1*11:04L HLA-DRB3*01:01L HLA-DPA1*01:03-B1*02:01L
VSLAIDAYPLTKHPN

SEQ ID NO: 20358 - protein, 14 aa, Severe acute respiratory syndrome coronavirus 2
  REGION 1..14: note = Table B: HLA-DRB1*08:04L HLA-DRB1*11:04L HLA-DRB1*08:01L
AYPLTKHPNQEYAD

SEQ ID NO: 20359 - protein, 14 aa, Severe acute respiratory syndrome coronavirus 2
  REGION 1..14: note = Table B: HLA-DRB1*08:04L HLA-DRB1*08:01L
YPLTKHPNQEYADV

SEQ ID NO: 20360 - protein, 15 aa, Severe acute respiratory syndrome coronavirus 2
  REGION 1..15: note = Table B: HLA-DRB1*08:04L HLA-DRB1*08:01L HLA-DRB1*04:08L
HPNQEYADVFHLYLQ

SEQ ID NO: 20361 - protein, 15 aa, Severe acute respiratory syndrome coronavirus 2
  REGION 1..15: note = Table B: HLA-DRB1*08:04L
KLSYGIATVREVLSD

SEQ ID NO: 20362 - protein, 16 aa, Severe acute respiratory syndrome coronavirus 2
  REGION 1..16: note = Table B: HLA-DRB1*08:04L HLA-DPA1*01:03-B1*04:02L
LSYGIATVREVLSDRE

SEQ ID NO: 20363 - protein, 13 aa, Severe acute respiratory syndrome coronavirus 2
  REGION 1..13: note = Table B: HLA-DRB1*08:04L HLA-DRB3*02:01L HLA-DPA1*03:01-B1*04:02L HLA-DRB1*08:03L
IATVREVLSDREL

SEQ ID NO: 20364 - protein, 12 aa, Severe acute respiratory syndrome coronavirus 2
  REGION 1..12: note = Table B: HLA-DRB1*08:04L HLA-DRB3*01:01L HLA-DRB1*04:08L
REVLSDRELHLS

SEQ ID NO: 20365 - protein, 18 aa, Severe acute respiratory syndrome coronavirus 2
  REGION 1..18: note = Table B: HLA-DRB1*08:04L HLA-DPA1*01:03-B1*04:02L HLA-DQA1*03:01-B1*03:02L HLA-DPA1*01:03-B1*02:01L HLA-DPA1*01:03-B1*104:01L HLA-DRB1*07:01L HLA-DQA1*01:03-B1*06:01L
KPRPPLNRNYVFTGYRVT

SEQ ID NO: 20366 - protein, 13 aa, Severe acute respiratory syndrome coronavirus 2
  REGION 1..13: note = Table B: HLA-DRB1*08:04L
AVVYRGTTTYKLN

SEQ ID NO: 20367 - protein, 14 aa, Severe acute respiratory syndrome coronavirus 2
  REGION 1..14: note = Table B: HLA-DRB1*08:04L HLA-DRB1*03:01L HLA-DRB1*11:02L HLA-DQA1*01-B1*05L HLA-DRB4*02:01NL HLA-DRB1*04:10L HLA-DPA1*01:03-B1*04:02L HLA-DPA1*01:03-B1*02:01L HLA-DPA1*01:03-B1*104:01L HLA-DRB1*08:02L HLA-DRB1*08:03L
VVYRGTTTYKLNVG

SEQ ID NO: 20368 - protein, 12 aa, Severe acute respiratory syndrome coronavirus 2
  REGION 1..12: note = Table B: HLA-DRB1*08:04L HLA-DRB3*02:01L HLA-DRB1*09:01L HLA-DRB1*12:02L HLA-DRB3*01:01L HLA-DRB1*14:54L HLA-DRB1*04:08L
TTTYKLNVGDYF

SEQ ID NO: 20369 - protein, 13 aa, Severe acute respiratory syndrome coronavirus 2
  REGION 1..13: note = Table B: HLA-DRB1*08:04L HLA-DPA1*01:03-B1*03:01L
YFVLTSHTVMPLS

SEQ ID NO: 20370 - protein, 15 aa, Severe acute respiratory syndrome coronavirus 2
  REGION 1..15: note = Table B: HLA-DRB1*08:04L HLA-DRB1*03:01L HLA-DRB1*11:04L HLA-DRB1*11:01L HLA-DRB4*02:01NL HLA-DRB3*01:01L HLA-DPA1*01:03-B1*104:01L HLA-DRB1*08:02L HLA-DRB1*15:01L
SHTVMPLSAPTLVPQ

SEQ ID NO: 20371 - protein, 14 aa, Severe acute respiratory syndrome coronavirus 2
  REGION 1..14: note = Table B: HLA-DRB1*08:04L HLA-DRB3*02:01L HLA-DRB1*11:02L HLA-DRB1*11:04L HLA-DRB1*11:01L HLA-DRB3*01:01L
APTLVPQEHYVRIT

SEQ ID NO: 20372 - protein, 14 aa, Severe acute respiratory syndrome coronavirus 2
  REGION 1..14: note = Table B: HLA-DRB1*08:04L HLA-DPA1*01:03-B1*04:02L HLA-DPA1*02:01-B1*13:01L HLA-DRB1*10:01L
EHYVRITGLYPTLN

SEQ ID NO: 20373 - protein, 12 aa, Severe acute respiratory syndrome coronavirus 2
  REGION 1..12: note = Table B: HLA-DRB1*08:04L HLA-DRB3*02:01L HLA-DRB1*11:03L HLA-DRB1*11:04L HLA-DRB1*04:10L HLA-DRB1*09:01L HLA-DRB1*12:02L HLA-DQA1*05:05-B1*03:01L HLA-DRB1*04:08L
SDEFSSNVANYQ

SEQ ID NO: 20374 - protein, 12 aa, Severe acute respiratory syndrome coronavirus 2
  REGION 1..12: note = Table B: HLA-DRB1*08:04L HLA-DRB3*02:01L HLA-DRB1*12:02L HLA-DRB3*01:01L HLA-DRB1*14:54L HLA-DRB1*07:01L
VANYQKVGMQKY

SEQ ID NO: 20375 - protein, 14 aa, Severe acute respiratory syndrome coronavirus 2
  REGION 1..14: note = Table B: HLA-DRB1*08:04L HLA-DPA1*01:03-B1*03:01L HLA-DRB1*08:01L HLA-DRB1*12:01L HLA-DRB1*15:03L
HFAIGLALYYPSAR

SEQ ID NO: 20376 - protein, 17 aa, Severe acute respiratory syndrome coronavirus 2
  REGION 1..17: note = Table B: HLA-DRB1*08:04L HLA-DPA1*01:03-B1*03:01L
EKALKYLPIDKCSRIIP

SEQ ID NO: 20377 - protein, 18 aa, Severe acute respiratory syndrome coronavirus 2
  REGION 1..18: note = Table B: HLA-DRB1*08:04L HLA-DPA1*01:02-B1*04:01L
IPARARVECFDKFKVNST

SEQ ID NO: 20378 - protein, 12 aa, Severe acute respiratory syndrome coronavirus 2
  REGION 1..12: note = Table B: HLA-DRB1*08:04L HLA-DRB1*04:08L
KFKVNSTLEQYV

SEQ ID NO: 20379 - protein, 17 aa, Severe acute respiratory syndrome coronavirus 2
  REGION 1..17: note = Table B: HLA-DRB1*08:04L
APRTLLTKGTLEPEYFN

SEQ ID NO: 20380 - protein, 17 aa, Severe acute respiratory syndrome coronavirus 2
  REGION 1..17: note = Table B: HLA-DRB1*08:04L HLA-DQA1*05:05-B1*03:19L
PEYFNSVCRLMKTIGPD

SEQ ID NO: 20381 - protein, 11 aa, Severe acute respiratory syndrome coronavirus 2
  REGION 1..11: note = Table B: HLA-DRB1*08:04L HLA-DRB1*08:77L HLA-DRB1*03:01L HLA-DRB1*11:03L HLA-DRB1*14:02L HLA-DQA1*05:01-B1*02:01L
ALVYDNKLKAH

SEQ ID NO: 20382 - protein, 18 aa, Severe acute respiratory syndrome coronavirus 2
  REGION 1..18: note = Table B: HLA-DRB1*08:04L
DKSAQCFKMFYKGVITHD

SEQ ID NO: 20383 - protein, 12 aa, Severe acute respiratory syndrome coronavirus 2
  REGION 1..12: note = Table B: HLA-DRB1*08:04L HLA-DPA1*03:01-B1*04:02L HLA-DPA1*01:03-B1*04:01L HLA-DRB1*09:01L HLA-DRB3*01:01L HLA-DPA1*02:01-B1*13:01L HLA-DPA1*01:03-B1*02:01L HLA-DPA1*01:03-B1*104:01L HLA-DRB1*07:01L
DVSSAINRPQIG

SEQ ID NO: 20384 - protein, 17 aa, Severe acute respiratory syndrome coronavirus 2
  REGION 1..17: note = Table B: HLA-DRB1*08:04L
VVREFLTRNPAWRKAVF

SEQ ID NO: 20385 - protein, 13 aa, Severe acute respiratory syndrome coronavirus 2
  REGION 1..13: note = Table B: HLA-DRB1*08:04L HLA-DRB1*11:02L HLA-DRB1*14:02L HLA-DRB1*09:01L HLA-DRB1*12:02L HLA-DRB1*07:01L
VFISPYNSQNAVA

SEQ ID NO: 20386 - protein, 15 aa, Severe acute respiratory syndrome coronavirus 2
  REGION 1..15: note = Table B: HLA-DRB1*08:04L HLA-DRB1*14:01L
NSQNAVASKILGLPT

SEQ ID NO: 20387 - protein, 14 aa, Severe acute respiratory syndrome coronavirus 2
  REGION 1..14: note = Table B: HLA-DRB1*08:04L HLA-DQA1*05:05-B1*03:19L HLA-DPA1*01:03-B1*02:01L HLA-DQA1*05:05-B1*03:01L
EYDYVIFTQTTETA

SEQ ID NO: 20388 - protein, 12 aa, Severe acute respiratory syndrome coronavirus 2
  REGION 1..12: note = Table B: HLA-DRB1*08:04L HLA-DRB1*08:01L HLA-DPA1*02:01-B1*13:01L
YVIFTQTTETAH

SEQ ID NO: 20389 - protein, 16 aa, Severe acute respiratory syndrome coronavirus 2
  REGION 1..16: note = Table B: HLA-DRB1*08:04L HLA-DRB1*11:04L HLA-DRB1*11:01L HLA-DRB3*01:01L HLA-DPA1*01:03-B1*02:01L
RDLYDKLQFTSLEIPR

SEQ ID NO: 20390 - protein, 12 aa, Severe acute respiratory syndrome coronavirus 2
  REGION 1..12: note = Table B: HLA-DRB1*08:04L HLA-DRB1*08:01L HLA-DRB1*08:03L
GYVDTPNNTDFS

SEQ ID NO: 20391 - protein, 15 aa, Severe acute respiratory syndrome coronavirus 2
  REGION 1..15: note = Table B: HLA-DRB1*08:04L
FKHLIPLMYKGLPWN

SEQ ID NO: 20392 - protein, 13 aa, Severe acute respiratory syndrome coronavirus 2
  REGION 1..13: note = Table B: HLA-DRB1*08:04L HLA-DRB1*14:01L HLA-DRB1*11:01L HLA-DPA1*01:03-B1*04:02L HLA-DPA1*03:01-B1*105:01L HLA-DRB1*04:08L
DTYACWHHSIGFD

SEQ ID NO: 20393 - protein, 14 aa, Severe acute respiratory syndrome coronavirus 2
  REGION 1..14: note = Table B: HLA-DRB1*08:04L HLA-DRB1*14:02L
SIGFDYVYNPFMID

SEQ ID NO: 20394 - protein, 13 aa, Severe acute respiratory syndrome coronavirus 2
  REGION 1..13: note = Table B: HLA-DRB1*08:04L HLA-DPA1*01:03-B1*03:01L
VYNPFMIDVQQWG

SEQ ID NO: 20395 - protein, 14 aa, Severe acute respiratory syndrome coronavirus 2
  REGION 1..14: note = Table B: HLA-DRB1*08:04L HLA-DPA1*01:03-B1*03:01L HLA-DRB1*08:01L HLA-DQA1*01-B1*05L HLA-DPA1*01:03-B1*02:01L
ALLADKFPVLHDIG

SEQ ID NO: 20396 - protein, 15 aa, Severe acute respiratory syndrome coronavirus 2
  REGION 1..15: note = Table B: HLA-DRB1*08:04L
DVEWKFYDAQPCSDK

SEQ ID NO: 20397 - protein, 15 aa, Severe acute respiratory syndrome coronavirus 2
  REGION 1..15: note = Table B: HLA-DRB1*08:04L
VEWKFYDAQPCSDKA

SEQ ID NO: 20398 - protein, 14 aa, Severe acute respiratory syndrome coronavirus 2
  REGION 1..14: note = Table B: HLA-DRB1*08:04L HLA-DPA1*02:01-B1*13:01L
VVSDIDYVPLKSAT

SEQ ID NO: 20399 - protein, 15 aa, Severe acute respiratory syndrome coronavirus 2
  REGION 1..15: note = Table B: HLA-DRB1*08:04L HLA-DRB3*02:01L HLA-DPA1*01:03-B1*104:01L
VYKQFDTYNLWNTFT

SEQ ID NO: 20400 - protein, 11 aa, Severe acute respiratory syndrome coronavirus 2
  REGION 1..11: note = Table B: HLA-DRB1*08:04L HLA-DRB1*14:01L HLA-DRB1*08:01L
NLWNTFTRLQS

SEQ ID NO: 20401 - protein, 12 aa, Severe acute respiratory syndrome coronavirus 2
  REGION 1..12: note = Table B: HLA-DRB1*08:04L HLA-DRB1*08:01L HLA-DRB1*11:01L HLA-DRB1*04:08L
LWNTFTRLQSLE

SEQ ID NO: 20402 - protein, 14 aa, Severe acute respiratory syndrome coronavirus 2
  REGION 1..14: note = Table B: HLA-DRB1*08:04L HLA-DRB1*11:02L
TFTRLQSLENVAFN

SEQ ID NO: 20403 - protein, 14 aa, Severe acute respiratory syndrome coronavirus 2
  REGION 1..14: note = Table B: HLA-DRB1*08:04L
APLTVFFDGRVDGQ

SEQ ID NO: 20404 - protein, 12 aa, Severe acute respiratory syndrome coronavirus 2
  REGION 1..12: note = Table B: HLA-DRB1*08:04L
TYFTQSRNLQEF

SEQ ID NO: 20405 - protein, 12 aa, Severe acute respiratory syndrome coronavirus 2
  REGION 1..12: note = Table B: HLA-DRB1*08:04L HLA-DRB3*01:01L HLA-DRB1*04:08L
ELAMDEFIERYK

SEQ ID NO: 20406 - protein, 13 aa, Severe acute respiratory syndrome coronavirus 2
  REGION 1..13: note = Table B: HLA-DRB1*08:04L
FIERYKLEGYAFE

SEQ ID NO: 20407 - protein, 12 aa, Severe acute respiratory syndrome coronavirus 2
  REGION 1..12: note = Table B: HLA-DRB1*08:04L HLA-DPA1*01:03-B1*02:01L HLA-DQA1*05:05-B1*03:01L
IVYGDFSHSQLG

SEQ ID NO: 20408 - protein, 14 aa, Severe acute respiratory syndrome coronavirus 2
  REGION 1..14: note = Table B: HLA-DRB1*08:04L
AKRFKESPFELEDF

SEQ ID NO: 20409 - protein, 13 aa, Severe acute respiratory syndrome coronavirus 2
  REGION 1..13: note = Table B: HLA-DRB1*08:04L HLA-DRB1*14:01L HLA-DRB1*11:04L HLA-DRB1*11:01L HLA-DPA1*01:03-B1*02:01L
KESPFELEDFIPM

SEQ ID NO: 20410 - protein, 13 aa, Severe acute respiratory syndrome coronavirus 2
  REGION 1..13: note = Table B: HLA-DRB1*08:04L
DFIPMDSTVKNYF

SEQ ID NO: 20411 - protein, 14 aa, Severe acute respiratory syndrome coronavirus 2
  REGION 1..14: note = Table B: HLA-DRB1*08:04L HLA-DQA1*01:01-B1*05:01L
IPMDSTVKNYFITD

SEQ ID NO: 20412 - protein, 14 aa, Severe acute respiratory syndrome coronavirus 2
  REGION 1..14: note = Table B: HLA-DRB1*08:04L HLA-DPA1*01:03-B1*03:01L HLA-DRB1*03:01L HLA-DRB1*11:03L HLA-DRB1*11:04L HLA-DRB1*11:01L HLA-DRB3*01:01L HLA-DRB1*04:08L
SQDLSVVSKVVKVT

SEQ ID NO: 20413 - protein, 13 aa, Severe acute respiratory syndrome coronavirus 2
  REGION 1..13: note = Table B: HLA-DRB1*08:04L
LSVVSKVVKVTID

SEQ ID NO: 20414 - protein, 12 aa, Severe acute respiratory syndrome coronavirus 2
  REGION 1..12: note = Table B: HLA-DRB1*08:04L HLA-DRB3*01:01L
KVTIDYTEISFM

SEQ ID NO: 20415 - protein, 13 aa, Severe acute respiratory syndrome coronavirus 2
  REGION 1..13: note = Table B: HLA-DRB1*08:04L HLA-DRB1*04:08L
VPYNMRVIHFGAG

SEQ ID NO: 20416 - protein, 16 aa, Severe acute respiratory syndrome coronavirus 2
  REGION 1..16: note = Table B: HLA-DRB1*08:04L HLA-DRB1*08:01L HLA-DPA1*01:03-B1*04:02L HLA-DPA1*01:03-B1*104:01L
APGTAVLRQWLPTGTL

SEQ ID NO: 20417 - protein, 13 aa, Severe acute respiratory syndrome coronavirus 2
  REGION 1..13: note = Table B: HLA-DRB1*08:04L
GFIQQKLALGGSV

SEQ ID NO: 20418 - protein, 13 aa, Severe acute respiratory syndrome coronavirus 2
  REGION 1..13: note = Table B: HLA-DRB1*08:04L HLA-DPA1*03:01-B1*04:02L HLA-DPA1*01:02-B1*04:01L
GGSVAIKITEHSW

SEQ ID NO: 20419 - protein, 14 aa, Severe acute respiratory syndrome coronavirus 2
  REGION 1..14: note = Table B: HLA-DRB1*08:04L
ITEHSWNADLYKLM

SEQ ID NO: 20420 - protein, 14 aa, Severe acute respiratory syndrome coronavirus 2
  REGION 1..14: note = Table B: HLA-DRB1*08:04L
TEHSWNADLYKLMG

SEQ ID NO: 20421 - protein, 18 aa, Severe acute respiratory syndrome coronavirus 2
  REGION 1..18: note = Table B: HLA-DRB1*08:04L HLA-DPA1*01:03-B1*03:01L
DGYVMHANYIFWRNTNPI

SEQ ID NO: 20422 - protein, 13 aa, Severe acute respiratory syndrome coronavirus 2
  REGION 1..13: note = Table B: HLA-DRB1*08:04L HLA-DRB1*08:01L HLA-DQA1*05:05-B1*03:19L
DMILSLLSKGRLI

SEQ ID NO: 20423 - protein, 15 aa, Severe acute respiratory syndrome coronavirus 2
  REGION 1..15: note = Table B: HLA-DRB1*08:04L HLA-DRB1*03:01L HLA-DRB1*11:02L HLA-DRB1*11:03L HLA-DRB1*13:01L
ILSLLSKGRLIIREN

SEQ ID NO: 20424 - protein, 14 aa, Severe acute respiratory syndrome coronavirus 2
  REGION 1..14: note = Table B: HLA-DRB1*08:04L HLA-DRB1*08:03L HLA-DRB1*15:01L
DNPVLPFNDGVYFA

SEQ ID NO: 20425 - protein, 15 aa, Severe acute respiratory syndrome coronavirus 2
  REGION 1..15: note = Table B: HLA-DRB1*08:04L HLA-DRB1*08:01L HLA-DRB1*15:03L
DSKTQSLLIVNNATN

SEQ ID NO: 20426 - protein, 12 aa, Severe acute respiratory syndrome coronavirus 2
  REGION 1..12: note = Table B: HLA-DRB1*08:04L HLA-DRB1*11:04L HLA-DQA1*05:05-B1*03:01L HLA-DRB1*04:08L
LLIVNNATNVVI

SEQ ID NO: 20427 - protein, 14 aa, Severe acute respiratory syndrome coronavirus 2
  REGION 1..14: note = Table B: HLA-DRB1*08:04L HLA-DRB1*14:01L HLA-DRB1*11:04L HLA-DRB1*11:01L HLA-DRB3*01:01L
NKSWMESEFRVYSS

SEQ ID NO: 20428 - protein, 14 aa, Severe acute respiratory syndrome coronavirus 2
  REGION 1..14: note = Table B: HLA-DRB1*08:04L HLA-DRB1*11:02L HLA-DRB1*08:01L HLA-DRB1*11:01L HLA-DRB1*09:01L HLA-DRB1*10:01L
EFRVYSSANNCTFE

SEQ ID NO: 20429 - protein, 13 aa, Severe acute respiratory syndrome coronavirus 2
  REGION 1..13: note = Table B: HLA-DRB1*08:04L HLA-DRB1*08:01L
TFEYVSQPFLMDL

SEQ ID NO: 20430 - protein, 12 aa, Severe acute respiratory syndrome coronavirus 2
  REGION 1..12: note = Table B: HLA-DRB1*08:04L HLA-DRB1*08:01L HLA-DPA1*01:03-B1*02:01L
EYVSQPFLMDLE

SEQ ID NO: 20431 - protein, 12 aa, Severe acute respiratory syndrome coronavirus 2
  REGION 1..12: note = Table B: HLA-DRB1*08:04L HLA-DRB3*01:01L
EFVFKNIDGYFK

SEQ ID NO: 20432 - protein, 12 aa, Severe acute respiratory syndrome coronavirus 2
  REGION 1..12: note = Table B: HLA-DRB1*08:04L HLA-DRB1*03:01L
NLVRDLPQGFSA

SEQ ID NO: 20433 - protein, 13 aa, Severe acute respiratory syndrome coronavirus 2
  REGION 1..13: note = Table B: HLA-DRB1*08:04L HLA-DRB3*02:01L HLA-DRB1*14:54L
VDLPIGINITRFQ

SEQ ID NO: 20434 - protein, 12 aa, Severe acute respiratory syndrome coronavirus 2
  REGION 1..12: note = Table B: HLA-DRB1*08:04L HLA-DRB1*08:01L
AYYVGYLQPRTF

SEQ ID NO: 20435 - protein, 12 aa, Severe acute respiratory syndrome coronavirus 2
  REGION 1..12: note = Table B: HLA-DRB1*08:04L HLA-DRB1*14:01L HLA-DRB1*08:01L HLA-DRB1*12:01L HLA-DPA1*03:01-B1*105:01L HLA-DRB1*10:01L HLA-DRB1*15:03L
KSFTVEKGIYQT

SEQ ID NO: 20436 - protein, 14 aa, Severe acute respiratory syndrome coronavirus 2
  REGION 1..14: note = Table B: HLA-DRB1*08:04L HLA-DRB3*02:01L HLA-DPA1*03:01-B1*04:02L HLA-DRB1*08:01L HLA-DPA1*01:03-B1*04:01L HLA-DRB1*04:10L HLA-DPA1*01:03-B1*04:02L HLA-DRB1*08:03L
VQPTESIVRFPNIT

SEQ ID NO: 20437 - protein, 14 aa, Severe acute respiratory syndrome coronavirus 2
  REGION 1..14: note = Table B: HLA-DRB1*08:04L HLA-DPA1*01:03-B1*03:01L HLA-DPA1*02:01-B1*13:01L HLA-DQA1*05:05-B1*03:01L
QPTESIVRFPNITN

SEQ ID NO: 20438 - protein, 12 aa, Severe acute respiratory syndrome coronavirus 2
  REGION 1..12: note = Table B: HLA-DRB1*08:04L
ESIVRFPNITNL

SEQ ID NO: 20439 - protein, 13 aa, Severe acute respiratory syndrome coronavirus 2
  REGION 1..13: note = Table B: HLA-DRB1*08:04L HLA-DRB1*04:10L HLA-DRB1*14:54L
NVYADSFVIRGDE

SEQ ID NO: 20440 - protein, 15 aa, Severe acute respiratory syndrome coronavirus 2
  REGION 1..15: note = Table B: HLA-DRB1*08:04L HLA-DPA1*01:03-B1*03:01L HLA-DRB1*03:01L HLA-DQA1*05:01-B1*02:01L HLA-DPA1*03:01-B1*105:01L
DSFVIRGDEVRQIAP

SEQ ID NO: 20441 - protein, 12 aa, Severe acute respiratory syndrome coronavirus 2
  REGION 1..12: note = Table B: HLA-DRB1*08:04L HLA-DRB1*08:01L HLA-DRB1*04:08L
NNLDSKVGGNYN

SEQ ID NO: 20442 - protein, 15 aa, Severe acute respiratory syndrome coronavirus 2
  REGION 1..15: note = Table B: HLA-DRB1*08:04L
YNYLYRLFRKSNLKP

SEQ ID NO: 20443 - protein, 15 aa, Severe acute respiratory syndrome coronavirus 2
  REGION 1..15: note = Table B: HLA-DRB1*08:04L HLA-DRB1*11:03L
NYLYRLFRKSNLKPF

SEQ ID NO: 20444 - protein, 14 aa, Severe acute respiratory syndrome coronavirus 2
  REGION 1..14: note = Table B: HLA-DRB1*08:04L
LYRLFRKSNLKPFE

SEQ ID NO: 20445 - protein, 14 aa, Severe acute respiratory syndrome coronavirus 2
  REGION 1..14: note = Table B: HLA-DRB1*08:04L HLA-DRB3*02:01L HLA-DRB1*08:01L HLA-DRB1*11:01L HLA-DPA1*02:01-B1*13:01L HLA-DPA1*01:03-B1*104:01L
EIYQAGSTPCNGVE

SEQ ID NO: 20446 - protein, 14 aa, Severe acute respiratory syndrome coronavirus 2
  REGION 1..14: note = Table B: HLA-DRB1*08:04L HLA-DRB1*09:01L HLA-DRB1*12:02L HLA-DRB1*04:08L
YGFQPTNGVGYQPY

SEQ ID NO: 20447 - protein, 17 aa, Severe acute respiratory syndrome coronavirus 2
  REGION 1..17: note = Table B: HLA-DRB1*08:04L
QPTNGVGYQPYRVVVLS

SEQ ID NO: 20448 - protein, 13 aa, Severe acute respiratory syndrome coronavirus 2
  REGION 1..13: note = Table B: HLA-DRB1*08:04L
TGVLTESNKKFLP

SEQ ID NO: 20449 - protein, 13 aa, Severe acute respiratory syndrome coronavirus 2
  REGION 1..13: note = Table B: HLA-DRB1*08:04L
GVLTESNKKFLPF

SEQ ID NO: 20450 - protein, 13 aa, Severe acute respiratory syndrome coronavirus 2
  REGION 1..13: note = Table B: HLA-DRB1*08:04L HLA-DRB1*11:03L HLA-DRB1*07:01L
DIADTTDAVRDPQ

SEQ ID NO: 20451 - protein, 13 aa, Severe acute respiratory syndrome coronavirus 2
  REGION 1..13: note = Table B: HLA-DRB1*08:04L HLA-DPA1*01:03-B1*02:01L
TSNQVAVLYQDVN

SEQ ID NO: 20452 - protein, 12 aa, Severe acute respiratory syndrome coronavirus 2
  REGION 1..12: note = Table B: HLA-DRB1*08:04L HLA-DRB1*08:01L
LIGAEHVNNSYE

SEQ ID NO: 20453 - protein, 19 aa, Severe acute respiratory syndrome coronavirus 2
  REGION 1..19: note = Table B: HLA-DRB1*08:04L
TPPIKDFGGFNFSQILPDP

SEQ ID NO: 20454 - protein, 15 aa, Severe acute respiratory syndrome coronavirus 2
  REGION 1..15: note = Table B: HLA-DRB1*08:04L
NKVTLADAGFIKQYG

SEQ ID NO: 20455 - protein, 13 aa, Severe acute respiratory syndrome coronavirus 2
  REGION 1..13: note = Table B: HLA-DRB1*08:04L HLA-DRB1*08:01L HLA-DPA1*01:03-B1*104:01L
YRFNGIGVTQNVL

SEQ ID NO: 20456 - protein, 16 aa, Severe acute respiratory syndrome coronavirus 2
  REGION 1..16: note = Table B: HLA-DRB1*08:04L HLA-DRB1*09:01L
FNGIGVTQNVLYENQK

SEQ ID NO: 20457 - protein, 12 aa, Severe acute respiratory syndrome coronavirus 2
  REGION 1..12: note = Table B: HLA-DRB1*08:04L HLA-DRB3*02:01L HLA-DRB1*11:03L HLA-DRB1*11:04L HLA-DRB1*14:02L HLA-DRB1*08:01L HLA-DRB1*04:10L HLA-DRB1*12:02L HLA-DRB3*01:01L HLA-DRB1*08:03L
NVLYENQKLIAN

SEQ ID NO: 20458 - protein, 12 aa, Severe acute respiratory syndrome coronavirus 2
  REGION 1..12: note = Table B: HLA-DRB1*08:04L HLA-DPA1*01:03-B1*03:01L HLA-DRB1*11:04L HLA-DRB1*14:02L HLA-DRB1*08:01L HLA-DRB1*11:01L HLA-DQA1*05:05-B1*03:19L HLA-DPA1*01:03-B1*04:02L HLA-DRB3*01:01L HLA-DPA1*01:03-B1*02:01L
  REGION 1..12: note = CONT. FROM ABOVE: HLA-DQA1*05:05-B1*03:01L
VLYENQKLIANQ

SEQ ID NO: 20459 - protein, 13 aa, Severe acute respiratory syndrome coronavirus 2
  REGION 1..13: note = Table B: HLA-DRB1*08:04L
DSLSSTASALGKL

SEQ ID NO: 20460 - protein, 14 aa, Severe acute respiratory syndrome coronavirus 2
  REGION 1..14: note = Table B: HLA-DRB1*08:04L HLA-DRB1*08:01L
SSTASALGKLQDVV

SEQ ID NO: 20461 - protein, 13 aa, Severe acute respiratory syndrome coronavirus 2
  REGION 1..13: note = Table B: HLA-DRB1*08:04L HLA-DRB3*02:01L HLA-DRB1*11:03L HLA-DRB1*11:04L HLA-DRB1*07:01L HLA-DRB1*10:01L
LQDVVNQNAQALN

SEQ ID NO: 20462 - protein, 12 aa, Severe acute respiratory syndrome coronavirus 2
  REGION 1..12: note = Table B: HLA-DRB1*08:04L HLA-DRB3*02:01L HLA-DPA1*01:03-B1*03:01L HLA-DRB1*14:02L HLA-DQA1*05:05-B1*03:01L HLA-DRB1*04:08L
VVNQNAQALNTL

SEQ ID NO: 20463 - protein, 12 aa, Severe acute respiratory syndrome coronavirus 2
  REGION 1..12: note = Table B: HLA-DRB1*08:04L
QALNTLVKQLSS

SEQ ID NO: 20464 - protein, 13 aa, Severe acute respiratory syndrome coronavirus 2
  REGION 1..13: note = Table B: HLA-DRB1*08:04L HLA-DPA1*03:01-B1*04:02L HLA-DPA1*02:01-B1*13:01L
LVKQLSSNFGAIS

SEQ ID NO: 20465 - protein, 13 aa, Severe acute respiratory syndrome coronavirus 2
  REGION 1..13: note = Table B: HLA-DRB1*08:04L HLA-DRB1*08:77L
VKQLSSNFGAISS

SEQ ID NO: 20466 - protein, 14 aa, Severe acute respiratory syndrome coronavirus 2
  REGION 1..14: note = Table B: HLA-DRB1*08:04L HLA-DQA1*01:01-B1*05:01L HLA-DRB3*01:01L
ISSVLNDILSRLDK

SEQ ID NO: 20467 - protein, 13 aa, Severe acute respiratory syndrome coronavirus 2
  REGION 1..13: note = Table B: HLA-DRB1*08:04L HLA-DRB1*08:77L HLA-DPA1*01:03-B1*03:01L HLA-DPA1*03:01-B1*04:02L HLA-DRB1*11:03L HLA-DRB1*14:02L HLA-DQA1*01-B1*05L HLA-DRB1*04:10L HLA-DPA1*02:01-B1*13:01L HLA-DRB1*07:01L
  REGION 1..13: note = CONT. FROM ABOVE: HLA-DRB1*10:01L
EVQIDRLITGRLQ

SEQ ID NO: 20468 - protein, 14 aa, Severe acute respiratory syndrome coronavirus 2
  REGION 1..14: note = Table B: HLA-DRB1*08:04L HLA-DPA1*01:03-B1*104:01L
VFLHVTYVPAQEKN

SEQ ID NO: 20469 - protein, 13 aa, Severe acute respiratory syndrome coronavirus 2
  REGION 1..13: note = Table B: HLA-DRB1*08:04L HLA-DRB1*08:01L HLA-DRB1*04:08L
GTHWFVTQRNFYE

SEQ ID NO: 20470 - protein, 12 aa, Severe acute respiratory syndrome coronavirus 2
  REGION 1..12: note = Table B: HLA-DRB1*08:04L HLA-DRB1*12:02L HLA-DRB1*14:54L
NTVYDPLQPELD

SEQ ID NO: 20471 - protein, 15 aa, Severe acute respiratory syndrome coronavirus 2
  REGION 1..15: note = Table B: HLA-DRB1*08:04L HLA-DRB1*11:03L HLA-DRB1*11:01L HLA-DRB1*08:03L
KEELDKYFKNHTSPD

SEQ ID NO: 20472 - protein, 12 aa, Severe acute respiratory syndrome coronavirus 2
  REGION 1..12: note = Table B: HLA-DRB1*08:04L HLA-DPA1*01:03-B1*03:01L HLA-DRB1*11:03L HLA-DRB1*11:01L HLA-DRB1*04:10L HLA-DRB1*10:01L HLA-DRB1*15:03L
SGINASVVNIQK

SEQ ID NO: 20473 - protein, 12 aa, Severe acute respiratory syndrome coronavirus 2
  REGION 1..12: note = Table B: HLA-DRB1*08:04L HLA-DRB1*11:01L HLA-DPA1*01:03-B1*104:01L
GINASVVNIQKE

SEQ ID NO: 20474 - protein, 12 aa, Severe acute respiratory syndrome coronavirus 2
  REGION 1..12: note = Table B: HLA-DRB1*08:04L HLA-DRB1*11:03L HLA-DRB1*04:10L HLA-DRB3*01:01L HLA-DRB1*14:54L
LNEVAKNLNESL

SEQ ID NO: 20475 - protein, 13 aa, Severe acute respiratory syndrome coronavirus 2
  REGION 1..13: note = Table B: HLA-DRB1*08:04L HLA-DRB1*11:03L HLA-DRB1*14:17L
NEVAKNLNESLID

SEQ ID NO: 20476 - protein, 14 aa, Severe acute respiratory syndrome coronavirus 2
  REGION 1..14: note = Table B: HLA-DRB1*08:04L HLA-DQA1*01:01-B1*05:01L
EVAKNLNESLIDLQ

SEQ ID NO: 20477 - protein, 13 aa, Severe acute respiratory syndrome coronavirus 2
  REGION 1..13: note = Table B: HLA-DRB1*08:04L HLA-DRB1*04:10L
ESLIDLQELGKYE

SEQ ID NO: 20478 - protein, 13 aa, Severe acute respiratory syndrome coronavirus 2
  REGION 1..13: note = Table B: HLA-DRB1*08:04L
IDLQELGKYEQYI

SEQ ID NO: 20479 - protein, 12 aa, Severe acute respiratory syndrome coronavirus 2
  REGION 1..12: note = Table B: HLA-DRB1*08:04L HLA-DRB1*14:01L
LGKYEQYIKWPW

SEQ ID NO: 20480 - protein, 10 aa, Severe acute respiratory syndrome coronavirus 2
  REGION 1..10: note = Table B: HLA-DRB1*08:04L HLA-DRB1*14:01L HLA-DRB1*08:01L
IITLKKRWQL

SEQ ID NO: 20481 - protein, 13 aa, Severe acute respiratory syndrome coronavirus 2
  REGION 1..13: note = Table B: HLA-DRB1*08:04L HLA-DRB3*02:01L HLA-DRB1*08:01L HLA-DPA1*01:03-B1*02:01L
VYFLQSINFVRII

SEQ ID NO: 20482 - protein, 18 aa, Severe acute respiratory syndrome coronavirus 2
  REGION 1..18: note = Table B: HLA-DRB1*08:04L HLA-DRB3*02:01L
SPISEHDYQIGGYTEKWE

SEQ ID NO: 20483 - protein, 15 aa, Severe acute respiratory syndrome coronavirus 2
  REGION 1..15: note = Table B: HLA-DRB1*08:04L HLA-DRB1*11:02L HLA-DRB4*01:01L HLA-DPA1*01:03-B1*04:02L HLA-DRB1*12:02L HLA-DRB1*08:02L
SDYYQLYSTQLSTDT

SEQ ID NO: 20484 - protein, 12 aa, Severe acute respiratory syndrome coronavirus 2
  REGION 1..12: note = Table B: HLA-DRB1*08:04L HLA-DRB1*08:01L HLA-DRB1*04:08L
VTFFIYNKIVDE

SEQ ID NO: 20485 - protein, 17 aa, Severe acute respiratory syndrome coronavirus 2
  REGION 1..17: note = Table B: HLA-DRB1*08:04L
SSGVVNPVMEPIYDEPT

SEQ ID NO: 20486 - protein, 14 aa, Severe acute respiratory syndrome coronavirus 2
  REGION 1..14: note = Table B: HLA-DRB1*08:04L HLA-DPA1*01:03-B1*03:01L
YSRVKNLNSSRVPD

SEQ ID NO: 20487 - protein, 14 aa, Severe acute respiratory syndrome coronavirus 2
  REGION 1..14: note = Table B: HLA-DRB1*08:04L HLA-DQA1*01:01-B1*05:01L HLA-DRB1*09:01L HLA-DPA1*01:03-B1*104:01L
SRVKNLNSSRVPDL

SEQ ID NO: 20488 - protein, 13 aa, Severe acute respiratory syndrome coronavirus 2
  REGION 1..13: note = Table B: HLA-DRB1*08:04L HLA-DPA1*01:03-B1*02:01L
SNGTITVEELKKL

SEQ ID NO: 20489 - protein, 13 aa, Severe acute respiratory syndrome coronavirus 2
  REGION 1..13: note = Table B: HLA-DRB1*08:04L
GTITVEELKKLLE

SEQ ID NO: 20490 - protein, 11 aa, Severe acute respiratory syndrome coronavirus 2
  REGION 1..11: note = Table B: HLA-DRB1*08:04L HLA-DRB1*08:01L
TVEELKKLLEQ

SEQ ID NO: 20491 - protein, 13 aa, Severe acute respiratory syndrome coronavirus 2
  REGION 1..13: note = Table B: HLA-DRB1*08:04L
RNRFLYIIKLIFL

SEQ ID NO: 20492 - protein, 14 aa, Severe acute respiratory syndrome coronavirus 2
  REGION 1..14: note = Table B: HLA-DRB1*08:04L HLA-DRB1*03:01L HLA-DRB1*11:03L HLA-DRB1*13:01L
AVILRGHLRIAGHH

SEQ ID NO: 20493 - protein, 16 aa, Severe acute respiratory syndrome coronavirus 2
  REGION 1..16: note = Table B: HLA-DRB1*08:04L
EITVATSRTLSYYKLG

SEQ ID NO: 20494 - protein, 12 aa, Severe acute respiratory syndrome coronavirus 2
  REGION 1..12: note = Table B: HLA-DRB1*08:04L
LDYIINLIIKNL

SEQ ID NO: 20495 - protein, 16 aa, Severe acute respiratory syndrome coronavirus 2
  REGION 1..16: note = Table B: HLA-DRB1*08:04L
KSLTENKYSQLDEEQP

SEQ ID NO: 20496 - protein, 13 aa, Severe acute respiratory syndrome coronavirus 2
  REGION 1..13: note = Table B: HLA-DRB1*08:04L
LYHYQECVRGTTV

SEQ ID NO: 20497 - protein, 13 aa, Severe acute respiratory syndrome coronavirus 2
  REGION 1..13: note = Table B: HLA-DRB1*08:04L
YHYQECVRGTTVL

SEQ ID NO: 20498 - protein, 12 aa, Severe acute respiratory syndrome coronavirus 2
  REGION 1..12: note = Table B: HLA-DRB1*08:04L
NSPFHPLADNKF

SEQ ID NO: 20499 - protein, 13 aa, Severe acute respiratory syndrome coronavirus 2
  REGION 1..13: note = Table B: HLA-DRB1*08:04L HLA-DRB1*14:02L HLA-DQA1*05:05-B1*03:01L HLA-DRB1*07:01L HLA-DRB1*08:03L
YEDFLEYHDVRVV

SEQ ID NO: 20500 - protein, 12 aa, Severe acute respiratory syndrome coronavirus 2
  REGION 1..12: note = Table B: HLA-DRB1*08:04L HLA-DRB1*08:01L HLA-DRB1*04:08L
LEYHDVRVVLDF

SEQ ID NO: 20501 - protein, 18 aa, Severe acute respiratory syndrome coronavirus 2
  REGION 1..18: note = Table B: HLA-DRB1*08:04L HLA-DQA1*05:05-B1*03:19L HLA-DRB1*08:02L
SPDDQIGYYRRATRRIRG

SEQ ID NO: 20502 - protein, 15 aa, Severe acute respiratory syndrome coronavirus 2
  REGION 1..15: note = Table B: HLA-DRB1*08:04L HLA-DRB1*15:03L
PRWYFYYLGTGPEAG

SEQ ID NO: 20503 - protein, 14 aa, Severe acute respiratory syndrome coronavirus 2
  REGION 1..14: note = Table B: HLA-DRB1*08:04L HLA-DRB3*02:01L HLA-DPA1*03:01-B1*04:02L HLA-DRB1*03:01L HLA-DRB1*14:01L HLA-DRB1*08:01L HLA-DRB1*11:01L HLA-DQA1*01-B1*05L HLA-DRB1*09:01L HLA-DPA1*01:03-B1*04:02L HLA-DRB3*01:01L
  REGION 1..14: note = CONT. FROM ABOVE: HLA-DPA1*02:01-B1*13:01L HLA-DPA1*01:03-B1*104 :01L HLA-DPA1*01:02-B1*04:01L HLA-DRB1*07:01L HLA-DRB1*08:02L HL A-DRB1*08:03L
IIWVATEGALNTPK

SEQ ID NO: 20504 - protein, 17 aa, Severe acute respiratory syndrome coronavirus 2
  REGION 1..17: note = Table B: HLA-DRB1*08:04L HLA-DQA1*01-B1*05L HLA-DPA1*01:02-B1*04:01L
NPANNAAIVLQLPQGTT

SEQ ID NO: 20505 - protein, 11 aa, Severe acute respiratory syndrome coronavirus 2
  REGION 1..11: note = Table B: HLA-DRB1*08:04L HLA-DRB1*14:54L
LALLLLDRLNQ

SEQ ID NO: 20506 - protein, 15 aa, Severe acute respiratory syndrome coronavirus 2
  REGION 1..15: note = Table B: HLA-DRB1*08:04L HLA-DRB1*11:04L
QELIRQGTDYKHWPQ

SEQ ID NO: 20507 - protein, 12 aa, Severe acute respiratory syndrome coronavirus 2
  REGION 1..12: note = Table B: HLA-DRB1*08:04L HLA-DPA1*03:01-B1*04:02L HLA-DRB1*08:01L HLA-DRB1*12:01L HLA-DRB1*14:54L
ASAFFGMSRIGM

SEQ ID NO: 20508 - protein, 11 aa, Severe acute respiratory syndrome coronavirus 2
  REGION 1..11: note = Table B: HLA-DRB1*08:04L HLA-DRB1*14:01L HLA-DRB1*08:01L HLA-DPA1*03:01-B1*105:01L
AFFGMSRIGME

SEQ ID NO: 20509 - protein, 14 aa, Severe acute respiratory syndrome coronavirus 2
  REGION 1..14: note = Table B: HLA-DRB1*08:04L HLA-DRB1*08:01L
VTLLPAADLDDFSK

SEQ ID NO: 20510 - protein, 14 aa, Severe acute respiratory syndrome coronavirus 2
  REGION 1..14: note = Table B: HLA-DRB1*08:04L HLA-DPA1*01:03-B1*03:01L HLA-DRB1*14:01L HLA-DRB1*14:02L HLA-DPA1*02:01-B1*13:01L
DLDDFSKQLQQSMS

SEQ ID NO: 20511 - protein, 11 aa, Severe acute respiratory syndrome coronavirus 2
  REGION 1..11: note = Table B: HLA-DRB1*08:77L HLA-DRB1*16:01L
NGNKGAGGHSY

SEQ ID NO: 20512 - protein, 15 aa, Severe acute respiratory syndrome coronavirus 2
  REGION 1..15: note = Table B: HLA-DRB1*08:77L HLA-DRB3*02:01L HLA-DRB1*14:02L HLA-DRB1*12:02L HLA-DPA1*01:02-B1*04:01L
EAKKVKPTVVVNAAN

SEQ ID NO: 20513 - protein, 14 aa, Severe acute respiratory syndrome coronavirus 2
  REGION 1..14: note = Table B: HLA-DRB1*08:77L HLA-DRB1*03:01L HLA-DRB1*09:01L HLA-DPA1*01:03-B1*04:02L HLA-DRB1*07:01L HLA-DQA1*01:03-B1*06:01L
SSFLEMKSEKQVEQ

SEQ ID NO: 20514 - protein, 11 aa, Severe acute respiratory syndrome coronavirus 2
  REGION 1..11: note = Table B: HLA-DRB1*08:77L HLA-DQA1*05:05-B1*03:19L HLA-DQA1*05:01-B1*02:01L HLA-DQA1*03:01-B1*03:02L HLA-DPA1*01:03-B1*104:01L
QEILGTVSWNL

SEQ ID NO: 20515 - protein, 11 aa, Severe acute respiratory syndrome coronavirus 2
  REGION 1..11: note = Table B: HLA-DRB1*08:77L HLA-DQA1*05:05-B1*03:116L HLA-DRB1*10:01L
VVDYGARFYFY

SEQ ID NO: 20516 - protein, 13 aa, Severe acute respiratory syndrome coronavirus 2
  REGION 1..13: note = Table B: HLA-DRB1*08:77L HLA-DRB1*09:01L HLA-DPA1*01:03-B1*104:01L HLA-DRB1*07:01L HLA-DRB1*10:01L
NINLHTQVVDMSM

SEQ ID NO: 20517 - protein, 10 aa, Severe acute respiratory syndrome coronavirus 2
  REGION 1..10: note = Table B: HLA-DRB1*08:77L HLA-DPA1*01:03-B1*03:01L HLA-DRB1*03:01L HLA-DRB1*11:02L HLA-DQA1*01-B1*05L HLA-DQA1*05:05-B1*03:19M HLA-DQA1*05:01-B1*02:01L HLA-DPA1*01:03-B1*104:01L HLA-DRB1*10:01L HLA-DRB1*16:01L
TDVFYKENSY

SEQ ID NO: 20518 - protein, 11 aa, Severe acute respiratory syndrome coronavirus 2
  REGION 1..11: note = Table B: HLA-DRB1*08:77L HLA-DRB3*02:01L HLA-DRB1*11:03L HLA-DRB1*11:04L HLA-DRB1*11:01L HLA-DQA1*05:05-B1*03:116L HLA-DRB1*12:02L HLA-DPA1*01:03-B1*02:01L HLA-DRB1*10:01L
NSYTTTIKPVT

SEQ ID NO: 20519 - protein, 13 aa, Severe acute respiratory syndrome coronavirus 2
  REGION 1..13: note = Table B: HLA-DRB1*08:77L HLA-DPA1*01:03-B1*03:01L HLA-DRB1*03:01L HLA-DRB1*11:03L HLA-DRB1*14:02L HLA-DRB1*08:01L HLA-DRB4*01:01L HLA-DRB1*12:02L HLA-DQA1*05:05-B1*03:01L HLA-DQA1*01:03-B1*06:01L
NIKFADDLNQLTG

SEQ ID NO: 20520 - protein, 10 aa, Severe acute respiratory syndrome coronavirus 2
  REGION 1..10: note = Table B: HLA-DRB1*08:77L HLA-DPA1*01:03-B1*03:01L HLA-DRB1*03:01L HLA-DRB1*11:02L HLA-DQA1*01-B1*05L HLA-DQA1*05:05-B1*03:19M HLA-DQA1*05:01-B1*02:01M HLA-DRB4*01:01L HLA-DPA1*01:03-B1*04:01L
  REGION 1..10: note = CONT. FROM ABOVE: HLA-DPA1*01:03-B1*104:01L HLA-DRB1*10:01L HLA- DRB1*16:01L
ADDLNQLTGY

SEQ ID NO: 20521 - protein, 12 aa, Severe acute respiratory syndrome coronavirus 2
  REGION 1..12: note = Table B: HLA-DRB1*08:77L HLA-DRB3*02:01L HLA-DPA1*03:01-B1*04:02L HLA-DRB1*14:01L HLA-DPA1*03:01-B1*105:01L
FDVLKSEDAQGM

SEQ ID NO: 20522 - protein, 11 aa, Severe acute respiratory syndrome coronavirus 2
  REGION 1..11: note = Table B: HLA-DRB1*08:77L HLA-DRB3*02:01L HLA-DRB1*07:01L
TILRTTNGDFL

SEQ ID NO: 20523 - protein, 15 aa, Severe acute respiratory syndrome coronavirus 2
  REGION 1..15: note = Table B: HLA-DRB1*08:77L HLA-DRB1*11:03L HLA-DRB1*11:04L HLA-DRB1*11:01L HLA-DRB1*08:02L
TFYLTNDVSFLAHIQ

SEQ ID NO: 20524 - protein, 13 aa, Severe acute respiratory syndrome coronavirus 2
  REGION 1..13: note = Table B: HLA-DRB1*08:77L HLA-DRB3*02:01L HLA-DRB1*11:03L HLA-DRB1*11:04L HLA-DRB1*14:02L HLA-DRB1*11:01L HLA-DRB1*09:01L HLA-DPA1*01:03-B1*04:02L HLA-DPA1*01:03-B1*104:01L HLA-DRB1*07:01L
SNHNFLVQAGNVQ

SEQ ID NO: 20525 - protein, 13 aa, Severe acute respiratory syndrome coronavirus 2
  REGION 1..13: note = Table B: HLA-DRB1*08:77L HLA-DRB1*11:03L HLA-DRB1*11:04L HLA-DRB1*14:02L HLA-DRB1*08:01L HLA-DRB1*11:01L HLA-DRB4*01:01L HLA-DRB1*04:10L HLA-DRB3*01:01L HLA-DPA1*01:03-B1*02:01L HLA-DPA1*01:03-B1*104:01L HLA-DQA1*05:05-B1*03:01L
GSALLEDEFTPFD

SEQ ID NO: 20526 - protein, 13 aa, Severe acute respiratory syndrome coronavirus 2
  REGION 1..13: note = Table B: HLA-DRB1*08:77L HLA-DRB3*02:01L HLA-DPA1*03:01-B1*04:02L HLA-DRB1*11:03L HLA-DRB1*14:02L HLA-DRB5*01:01L HLA-DRB1*09:01L HLA-DPA1*01:03-B1*104:01L HLA-DRB1*07:01L
IISVTSNYSGVVT

SEQ ID NO: 20527 - protein, 10 aa, Severe acute respiratory syndrome coronavirus 2
  REGION 1..10: note = Table B: HLA-DRB1*08:77L HLA-DPA1*01:03-B1*03:01L HLA-DRB1*03:01L HLA-DRB1*11:02L HLA-DQA1*01-B1*05L HLA-DQA1*05:05-B1*03:19M HLA-DQA1*05:01-B1*02:01L HLA-DPA1*01:03-B1*104:01L HLA-DRB1*16:01L
ASEFSSLPSY

SEQ ID NO: 20528 - protein, 14 aa, Severe acute respiratory syndrome coronavirus 2
  REGION 1..14: note = Table B: HLA-DRB1*08:77L HLA-DPA1*03:01-B1*04:02L HLA-DRB1*03:01L HLA-DRB1*11:02L HLA-DRB1*11:03L HLA-DRB1*11:04L HLA-DRB1*14:02L HLA-DRB1*11:01L HLA-DQA1*05:05-B1*03:19L HLA-DPA1*03:01-B1*105:01L
NNIINNARDGCVPL

SEQ ID NO: 20529 - protein, 12 aa, Severe acute respiratory syndrome coronavirus 2
  REGION 1..12: note = Table B: HLA-DRB1*08:77L HLA-DPA1*01:03-B1*03:01L HLA-DRB1*08:01L HLA-DQA1*05:05-B1*03:19L HLA-DRB4*01:01L HLA-DRB1*09:01L HLA-DPA1*02:01-B1*13:01L
WEIQQVVDADSK

SEQ ID NO: 20530 - protein, 11 aa, Severe acute respiratory syndrome coronavirus 2
  REGION 1..11: note = Table B: HLA-DRB1*08:77L HLA-DRB1*12:02L
TALRANSAVKL

SEQ ID NO: 20531 - protein, 14 aa, Severe acute respiratory syndrome coronavirus 2
  REGION 1..14: note = Table B: HLA-DRB1*08:77L HLA-DRB1*14:01L
QAITVTPEANMDQE

SEQ ID NO: 20532 - protein, 16 aa, Severe acute respiratory syndrome coronavirus 2
  REGION 1..16: note = Table B: HLA-DRB1*08:77L HLA-DRB3*02:01L HLA-DPA1*03:01-B1*04:02L HLA-DRB1*14:01L HLA-DRB4*01:01L HLA-DPA1*01:03-B1*04:01L HLA-DPA1*01:03-B1*104:01L HLA-DRB1*07:01L
VTPEANMDQESFGGAS

SEQ ID NO: 20533 - protein, 13 aa, Severe acute respiratory syndrome coronavirus 2
  REGION 1..13: note = Table B: HLA-DRB1*08:77L HLA-DRB1*11:03L HLA-DRB1*11:04L HLA-DRB1*14:02L HLA-DRB1*11:01L HLA-DRB1*09:01L HLA-DRB3*01:01L HLA-DPA1*01:03-B1*02:01L HLA-DPA1*01:03-B1*104:01L HLA-DRB1*07:01L
DDYVYLPYPDPSR

SEQ ID NO: 20534 - protein, 13 aa, Severe acute respiratory syndrome coronavirus 2
  REGION 1..13: note = Table B: HLA-DRB1*08:77L HLA-DRB1*11:03L HLA-DRB4*01:01L HLA-DQA1*05:05-B1*03:116L HLA-DRB1*12:02L HLA-DRB1*07:01L HLA-DRB1*08:03L
LFAAETLKATEET

SEQ ID NO: 20535 - protein, 14 aa, Severe acute respiratory syndrome coronavirus 2
  REGION 1..14: note = Table B: HLA-DRB1*08:77L HLA-DPA1*01:03-B1*03:01L HLA-DRB1*03:01L HLA-DRB1*11:01L HLA-DQA1*05:05-B1*03:19L HLA-DRB1*09:01L HLA-DRB3*01:01L HLA-DPA1*03:01-B1*105:01L HLA-DRB1*07:01L HLA-DRB1*08:02L
MQKYSTLQGPPGTG

SEQ ID NO: 20536 - protein, 17 aa, Severe acute respiratory syndrome coronavirus 2
  REGION 1..17: note = Table B: HLA-DRB1*08:77L HLA-DRB1*03:01L HLA-DRB4*01:01L HLA-DRB1*12:02L HLA-DRB1*15:01L
YPSARIVYTACSHAAVD

SEQ ID NO: 20537 - protein, 10 aa, Severe acute respiratory syndrome coronavirus 2
  REGION 1..10: note = Table B: HLA-DRB1*08:77L HLA-DPA1*01:03-B1*03:01L HLA-DRB1*03:01L HLA-DQA1*01-B1*05L HLA-DQA1*05:05-B1*03:19M HLA-DQA1*05:01-B1*02:01L HLA-DPA1*01:03-B1*104:01L HLA-DRB1*16:01L
FDEISMATNY

SEQ ID NO: 20538 - protein, 13 aa, Severe acute respiratory syndrome coronavirus 2
  REGION 1..13: note = Table B: HLA-DRB1*08:77L
THLSVDTKFKTEG

SEQ ID NO: 20539 - protein, 15 aa, Severe acute respiratory syndrome coronavirus 2
  REGION 1..15: note = Table B: HLA-DRB1*08:77L HLA-DRB1*03:01L HLA-DQA1*01:01-B1*05:01L HLA-DRB4*01:01L HLA-DQA1*05:05-B1*03:116L HLA-DRB1*04:10L
IGFDYVYNPFMIDVQ

SEQ ID NO: 20540 - protein, 14 aa, Severe acute respiratory syndrome coronavirus 2
  REGION 1..14: note = Table B: HLA-DRB1*08:77L HLA-DRB1*03:01L HLA-DRB1*11:02L HLA-DPA1*01:03-B1*04:01L HLA-DRB1*09:01L HLA-DPA1*01:03-B1*02:01L HLA-DRB1*08:02L
VEWKFYDAQPCSDK

SEQ ID NO: 20541 - protein, 15 aa, Severe acute respiratory syndrome coronavirus 2
  REGION 1..15: note = Table B: HLA-DRB1*08:77L HLA-DRB3*02:01L HLA-DPA1*03:01-B1*04:02L HLA-DRB1*03:01L HLA-DRB1*11:02L HLA-DRB1*11:03L HLA-DRB1*14:02L HLA-DRB1*08:01L HLA-DRB4*01:01L HLA-DRB1*09:01L HLA-DPA1*01:03-B1*04:02L HLA-DRB3*01:01L
  REGION 1..15: note = CONT. FROM ABOVE: HLA-DPA1*01:03-B1*104:01L HLA-DRB1*08:02L HLA- DRB1*08:03L
DTRVLSNLNLPGCDG

SEQ ID NO: 20542 - protein, 12 aa, Severe acute respiratory syndrome coronavirus 2
  REGION 1..12: note = Table B: HLA-DRB1*08:77L HLA-DRB3*02:01L HLA-DRB1*11:02L HLA-DRB1*14:02L HLA-DRB4*01:01L HLA-DPA1*01:03-B1*04:01L HLA-DQA1*05:05-B1*03:116L HLA-DRB1*09:01L HLA-DRB3*01:01L HLA-DPA1*01:03-B1*02:01L HLA-DPA1*01:03-B1*104:01L
  REGION 1..12: note = CONT. FROM ABOVE: HLA-DRB1*07:01L HLA-DRB1*08:02L
WNTFTRLQSLEN

SEQ ID NO: 20543 - protein, 13 aa, Severe acute respiratory syndrome coronavirus 2
  REGION 1..13: note = Table B: HLA-DRB1*08:77L HLA-DRB1*11:02L HLA-DPA1*01:03-B1*02:01L
NVAFNVVNKGHFD

SEQ ID NO: 20544 - protein, 13 aa, Severe acute respiratory syndrome coronavirus 2
  REGION 1..13: note = Table B: HLA-DRB1*08:77L HLA-DRB1*03:01L HLA-DRB1*11:02L HLA-DRB1*13:01L
VAFNVVNKGHFDG

SEQ ID NO: 20545 - protein, 15 aa, Severe acute respiratory syndrome coronavirus 2
  REGION 1..15: note = Table B: HLA-DRB1*08:77L HLA-DRB1*11:02L HLA-DRB4*01:01L
ESPFELEDFIPMDST

SEQ ID NO: 20546 - protein, 11 aa, Severe acute respiratory syndrome coronavirus 2
  REGION 1..11: note = Table B: HLA-DRB1*08:77L HLA-DRB1*03:01L HLA-DQA1*01-B1*05L HLA-DQA1*05:05-B1*03:19L HLA-DPA1*01:03-B1*04:02L HLA-DQA1*01:03-B1*06:01L
VAPGTAVLRQW

SEQ ID NO: 20547 - protein, 13 aa, Severe acute respiratory syndrome coronavirus 2
  REGION 1..13: note = Table B: HLA-DRB1*08:77L HLA-DRB3*02:01L HLA-DPA1*01:03-B1*03:01L
KLALGGSVAIKIT

SEQ ID NO: 20548 - protein, 13 aa, Severe acute respiratory syndrome coronavirus 2
  REGION 1..13: note = Table B: HLA-DRB1*08:77L HLA-DRB1*11:03L HLA-DQA1*05:05-B1*03:116L HLA-DRB1*09:01L HLA-DRB1*12:02L HLA-DRB1*08:03L
GVYFASTEKSNII

SEQ ID NO: 20549 - protein, 13 aa, Severe acute respiratory syndrome coronavirus 2
  REGION 1..13: note = Table B: HLA-DRB1*08:77L HLA-DRB1*11:03L HLA-DRB1*11:01L HLA-DRB3*01:01L HLA-DRB1*08:03L
VYFASTEKSNIIR

SEQ ID NO: 20550 - protein, 15 aa, Severe acute respiratory syndrome coronavirus 2
  REGION 1..15: note = Table B: HLA-DRB1*08:77L HLA-DRB1*11:02L HLA-DRB1*09:01L HLA-DPA1*01:03-B1*104:01L HLA-DRB1*15:01L
LKSFTVEKGIYQTSN

SEQ ID NO: 20551 - protein, 11 aa, Severe acute respiratory syndrome coronavirus 2
  REGION 1..11: note = Table B: HLA-DRB1*08:77L HLA-DQA1*05:01-B1*02:01L HLA-DPA1*01:03-B1*04:01L
RVQPTESIVRF

SEQ ID NO: 20552 - protein, 14 aa, Severe acute respiratory syndrome coronavirus 2
  REGION 1..14: note = Table B: HLA-DRB1*08:77L HLA-DRB1*14:02L HLA-DRB1*11:01L HLA-DRB4*01:01L HLA-DRB1*09:01L
ADYSVLYNSASFST

SEQ ID NO: 20553 - protein, 14 aa, Severe acute respiratory syndrome coronavirus 2
  REGION 1..14: note = Table B: HLA-DRB1*08:77L HLA-DRB1*03:01L HLA-DRB1*11:03L HLA-DRB1*11:01L HLA-DRB4*01:01L HLA-DPA1*01:03-B1*04:01L HLA-DRB1*09:01L HLA-DPA1*01:03-B1*02:01L HLA-DPA1*01:03-B1*104:01L HLA-DRB1*07:01L HLA-DRB1*10:01L
TNVYADSFVIRGDE

SEQ ID NO: 20554 - protein, 13 aa, Severe acute respiratory syndrome coronavirus 2
  REGION 1..13: note = Table B: HLA-DRB1*08:77L HLA-DRB3*02:01L HLA-DRB1*11:03L HLA-DRB1*14:02L HLA-DQA1*01:01-B1*05:01L HLA-DRB1*11:01L HLA-DQA1*05:05-B1*03:19L HLA-DPA1*01:03-B1*04:02L HLA-DRB1*12:02L HLA-DRB3*01:01L HLA-DRB1*10:01L HLA-DRB1*08:02L
DLLFNKVTLADAG

SEQ ID NO: 20555 - protein, 12 aa, Severe acute respiratory syndrome coronavirus 2
  REGION 1..12: note = Table B: HLA-DRB1*08:77L HLA-DRB3*02:01L HLA-DPA1*01:03-B1*03:01L HLA-DRB1*11:03L HLA-DQA1*01:01-B1*05:01L HLA-DQA1*01-B1*05L HLA-DRB1*04:10L HLA-DRB1*09:01L HLA-DPA1*02:01-B1*13:01L HLA-DRB1*07:01L
  REGION 1..12: note = CONT. FROM ABOVE: HLA-DRB1*04:08L
NKVTLADAGFIK

SEQ ID NO: 20556 - protein, 11 aa, Severe acute respiratory syndrome coronavirus 2
  REGION 1..11: note = Table B: HLA-DRB1*08:77L
ALLAGTITSGW

SEQ ID NO: 20557 - protein, 15 aa, Severe acute respiratory syndrome coronavirus 2
  REGION 1..15: note = Table B: HLA-DRB1*08:77L HLA-DRB3*02:01L HLA-DRB1*11:02L HLA-DQA1*01-B1*05L HLA-DPA1*01:03-B1*04:01L HLA-DRB1*09:01L HLA-DRB1*12:02L HLA-DRB1*08:02L
TQQLIRAAEIRASAN

SEQ ID NO: 20558 - protein, 15 aa, Severe acute respiratory syndrome coronavirus 2
  REGION 1..15: note = Table B: HLA-DRB1*08:77L HLA-DPA1*03:01-B1*04:02L HLA-DRB1*11:02L HLA-DQA1*01:01-B1*05:01L HLA-DRB1*09:01L HLA-DPA1*01:03-B1*104:01L HLA-DRB1*08:02L
GKGYHLMSFPQSAPH

SEQ ID NO: 20559 - protein, 18 aa, Severe acute respiratory syndrome coronavirus 2
  REGION 1..18: note = Table B: HLA-DRB1*08:77L HLA-DRB1*03:01L HLA-DRB1*11:02L HLA-DRB1*11:03L HLA-DRB1*11:04L HLA-DRB4*01:01L HLA-DPA1*01:03-B1*04:01L HLA-DRB1*04:10L HLA-DRB1*09:01L HLA-DRB3*01:01L HLA-DPA1*01:03-B1*02:01L HLA-DRB1*08:02L
VPAQEKNFTTAPAICHDG

SEQ ID NO: 20560 - protein, 15 aa, Severe acute respiratory syndrome coronavirus 2
  REGION 1..15: note = Table B: HLA-DRB1*08:77L HLA-DRB1*13:01L HLA-DRB4*01:01L
GTHWFVTQRNFYEPQ

SEQ ID NO: 20561 - protein, 11 aa, Severe acute respiratory syndrome coronavirus 2
  REGION 1..11: note = Table B: HLA-DRB1*08:77L HLA-DRB1*03:01L HLA-DRB1*11:02L HLA-DRB1*14:02L HLA-DQA1*01-B1*05L HLA-DRB4*01:01L HLA-DPA1*01:03-B1*04:01L HLA-DRB1*16:01L HLA-DRB1*15:03L
VAAGLEAPFLY

SEQ ID NO: 20562 - protein, 12 aa, Severe acute respiratory syndrome coronavirus 2
  REGION 1..12: note = Table B: HLA-DRB1*08:77L HLA-DPA1*01:03-B1*03:01L HLA-DRB1*14:01L HLA-DRB1*11:03L HLA-DRB1*11:04L HLA-DRB5*01:01L HLA-DQA1*05:05-B1*03:19L HLA-DRB1*12:02L HLA-DRB1*10:01L HLA-DQA1*01:03-B1*06:01L HLA-DRB1*04:08L
STQLSTDTGVEH

SEQ ID NO: 20563 - protein, 12 aa, Severe acute respiratory syndrome coronavirus 2
  REGION 1..12: note = Table B: HLA-DRB1*08:77L HLA-DRB3*02:01L HLA-DPA1*01:03-B1*03:01L HLA-DRB1*11:03L HLA-DRB1*12:02L HLA-DPA1*02:01-B1*13:01L HLA-DRB1*07:01L
VKNLNSSRVPDL

SEQ ID NO: 20564 - protein, 11 aa, Severe acute respiratory syndrome coronavirus 2
  REGION 1..11: note = Table B: HLA-DRB1*08:77L HLA-DRB3*02:01L HLA-DPA1*01:03-B1*03:01L HLA-DQA1*01-B1*05L HLA-DRB4*01:01L HLA-DQA1*03:01-B1*03:02L HLA-DPA1*01:03-B1*104:01L HLA-DRB1*16:01L
EEVQELYSPIF

SEQ ID NO: 20565 - protein, 10 aa, Severe acute respiratory syndrome coronavirus 2
  REGION 1..10: note = Table B: HLA-DRB1*08:77L HLA-DPA1*01:03-B1*03:01L HLA-DRB1*03:01L HLA-DRB1*11:02L HLA-DQA1*01-B1*05L HLA-DQA1*05:05-B1*03:19M HLA-DQA1*05:01-B1*02:01L HLA-DPA1*01:03-B1*104:01L HLA-DRB1*16:01L
VDDPCPIHFY

SEQ ID NO: 20566 - protein, 13 aa, Severe acute respiratory syndrome coronavirus 2
  REGION 1..13: note = Table B: HLA-DRB1*08:77L HLA-DRB3*02:01L HLA-DPA1*03:01-B1*04:02L HLA-DRB1*11:03L HLA-DQA1*01:01-B1*05:01L HLA-DQA1*01-B1*05L HLA-DRB1*09:01L HLA-DRB1*12:02L HLA-DRB3*01:01L HLA-DPA1*01:03-B1*02:01L
  REGION 1..13: note = CONT. FROM ABOVE: HLA-DPA1*01:03-B1*104:01L HLA-DRB1*07:01L HLA- DRB1*08:02L HLA-DRB1*08:03L
ASWFTALTQHGKE

SEQ ID NO: 20567 - protein, 16 aa, Severe acute respiratory syndrome coronavirus 2
  REGION 1..16: note = Table B: HLA-DRB1*08:77L HLA-DRB1*13:01L HLA-DQA1*05:05-B1*03:116L HLA-DRB1*15:01L
GTDYKHWPQIAQFAPS

SEQ ID NO: 20568 - protein, 16 aa, Severe acute respiratory syndrome coronavirus 2
  REGION 1..16: note = Table B: HLA-DRB1*08:77L HLA-DRB3*02:01L HLA-DRB1*11:02L HLA-DRB4*01:01L HLA-DQA1*05:05-B1*03:116L HLA-DRB1*04:10L HLA-DRB1*09:01L HLA-DRB1*08:02L
DPNFKDQVILLNKHID

SEQ ID NO: 20569 - protein, 11 aa, Severe acute respiratory syndrome coronavirus 2
  REGION 1..11: note = Table B: HLA-DRB3*02:01L HLA-DRB1*08:01L HLA-DRB1*09:01L HLA-DRB1*08:03L
GVLPQLEQPYV

SEQ ID NO: 20570 - protein, 18 aa, Severe acute respiratory syndrome coronavirus 2
  REGION 1..18: note = Table B: HLA-DRB3*02:01L HLA-DRB1*14:02L HLA-DRB4*01:01L
APHGHVMVELVAELEGIQ

SEQ ID NO: 20571 - protein, 13 aa, Severe acute respiratory syndrome coronavirus 2
  REGION 1..13: note = Table B: HLA-DRB3*02:01L HLA-DRB1*11:02L HLA-DRB1*11:03L HLA-DQA1*01:01-B1*05:01L HLA-DRB1*09:01L HLA-DRB1*12:02L HLA-DRB1*07:01L HLA-DRB1*08:02L HLA-DRB1*08:03L
IAWYTERSEKSYE

SEQ ID NO: 20572 - protein, 13 aa, Severe acute respiratory syndrome coronavirus 2
  REGION 1..13: note = Table B: HLA-DRB3*02:01L
WYTERSEKSYELQ

SEQ ID NO: 20573 - protein, 18 aa, Severe acute respiratory syndrome coronavirus 2
  REGION 1..18: note = Table B: HLA-DRB3*02:01L HLA-DRB1*11:02L HLA-DRB1*10:01L
LPQNAVVKIYCPACHNSE

SEQ ID NO: 20574 - protein, 12 aa, Severe acute respiratory syndrome coronavirus 2
  REGION 1..12: note = Table B: HLA-DRB3*02:01L HLA-DPA1*03:01-B1*04:02L HLA-DRB1*14:01L HLA-DPA1*03:01-B1*105:01L
VNINIVGDFKLN

SEQ ID NO: 20575 - protein, 13 aa, Severe acute respiratory syndrome coronavirus 2
  REGION 1..13: note = Table B: HLA-DRB3*02:01L HLA-DRB1*11:03L HLA-DQA1*05:01-B1*02:01L HLA-DPA1*01:03-B1*104:01L HLA-DQA1*05:05-B1*03:01L HLA-DRB1*10:01L
GLDYKAFKQIVES

SEQ ID NO: 20576 - protein, 15 aa, Severe acute respiratory syndrome coronavirus 2
  REGION 1..15: note = Table B: HLA-DRB3*02:01L HLA-DRB1*15:01L
LKPVLDWLEEKFKEG

SEQ ID NO: 20577 - protein, 16 aa, Severe acute respiratory syndrome coronavirus 2
  REGION 1..16: note = Table B: HLA-DRB3*02:01L HLA-DQA1*05:05-B1*03:116L HLA-DPA1*01:03-B1*104:01L
GGQIVTCAKEIKESVQ

SEQ ID NO: 20578 - protein, 15 aa, Severe acute respiratory syndrome coronavirus 2
  REGION 1..15: note = Table B: HLA-DRB3*02:01L
TEEVVLKTGDLQPLE

SEQ ID NO: 20579 - protein, 16 aa, Severe acute respiratory syndrome coronavirus 2
  REGION 1..16: note = Table B: HLA-DRB3*02:01L
KVTFGDDTVIEVQGYK

SEQ ID NO: 20580 - protein, 16 aa, Severe acute respiratory syndrome coronavirus 2
  REGION 1..16: note = Table B: HLA-DRB3*02:01L HLA-DRB1*14:02L HLA-DQA1*05:05-B1*03:19L HLA-DPA1*01:03-B1*04:02L HLA-DPA1*01:03-B1*104:01L HLA-DRB1*08:03L
VIKTLQPVSELLTPLG

SEQ ID NO: 20581 - protein, 18 aa, Severe acute respiratory syndrome coronavirus 2
  REGION 1..18: note = Table B: HLA-DRB3*02:01L HLA-DPA1*03:01-B1*04:02L HLA-DPA1*01:03-B1*04:01L HLA-DQA1*05:05-B1*03:116L HLA-DPA1*01:03-B1*104:01L HLA-DPA1*01:02-B1*04:01L HLA-DRB1*08:02L
EPSTQYEYGTEDDYQGKP

SEQ ID NO: 20582 - protein, 15 aa, Severe acute respiratory syndrome coronavirus 2
  REGION 1..15: note = Table B: HLA-DRB3*02:01L HLA-DRB1*11:04L HLA-DRB1*08:02L
TEDDYQGKPLEFGAT

SEQ ID NO: 20583 - protein, 13 aa, Severe acute respiratory syndrome coronavirus 2
  REGION 1..13: note = Table B: HLA-DRB3*02:01L HLA-DPA1*01:03-B1*03:01L HLA-DRB1*11:02L HLA-DRB1*11:03L HLA-DRB1*11:04L HLA-DRB1*14:02L HLA-DQA1*01:01-B1*05:01L HLA-DQA1*05:01-B1*02:01L HLA-DQA1*05:05-B1*03:116L HLA-DRB1*04:10L HLA-DRB3*01:01L
  REGION 1..13: note = CONT. FROM ABOVE: HLA-DRB1*14:54L HLA-DPA1*01:03-B1*104:01L HLA- DRB1*10:01L HLA-DRB1*08:02L
VNSFSGYLKLTDN

SEQ ID NO: 20584 - protein, 13 aa, Severe acute respiratory syndrome coronavirus 2
  REGION 1..13: note = Table B: HLA-DRB3*02:01L HLA-DRB1*11:04L HLA-DRB1*14:02L HLA-DRB1*11:01L HLA-DPA1*01:03-B1*04:01L HLA-DPA1*01:03-B1*04:02L HLA-DRB3*01:01L HLA-DPA1*01:03-B1*104:01L HLA-DRB1*07:01L HLA-DRB1*10:01L
  REGION 1..13: note = CONT. FROM ABOVE: HLA-DRB1*08:03L
VYIKNADIVEEAK

SEQ ID NO: 20585 - protein, 13 aa, Severe acute respiratory syndrome coronavirus 2
  REGION 1..13: note = Table B: HLA-DRB3*02:01L HLA-DPA1*01:03-B1*03:01L HLA-DRB1*14:02L HLA-DRB1*11:01L HLA-DRB5*01:01L HLA-DRB1*04:10L HLA-DRB1*09:01L HLA-DRB3*01:01L HLA-DPA1*02:01-B1*13:01L HLA-DPA1*01:02-B1*04:01L HLA-DRB1*10:01L
  REGION 1..13: note = CONT. FROM ABOVE: HLA-DQA1*01:03-B1*06:01L HLA-DRB1*08:03L
ANVYLKHGGGVAG

SEQ ID NO: 20586 - protein, 15 aa, Severe acute respiratory syndrome coronavirus 2
  REGION 1..15: note = Table B: HLA-DRB3*02:01L
DTVRTNVYLAVFDKN

SEQ ID NO: 20587 - protein, 13 aa, Severe acute respiratory syndrome coronavirus 2
  REGION 1..13: note = Table B: HLA-DRB3*02:01L
DKNLYDKLVSSFL

SEQ ID NO: 20588 - protein, 16 aa, Severe acute respiratory syndrome coronavirus 2
  REGION 1..16: note = Table B: HLA-DRB3*02:01L HLA-DRB1*14:02L HLA-DQA1*05:05-B1*03:19L
YDKLVSSFLEMKSEKQ

SEQ ID NO: 20589 - protein, 14 aa, Severe acute respiratory syndrome coronavirus 2
  REGION 1..14: note = Table B: HLA-DRB3*02:01L HLA-DRB1*03:01L HLA-DRB1*11:02L HLA-DPA1*01:03-B1*104:01L
VSSFLEMKSEKQVE

SEQ ID NO: 20590 - protein, 16 aa, Severe acute respiratory syndrome coronavirus 2
  REGION 1..16: note = Table B: HLA-DRB3*02:01L HLA-DRB1*11:02L HLA-DPA1*01:03-B1*04:01L HLA-DRB1*09:01L HLA-DRB1*08:03L HLA-DRB1*15:01L
ENLLLYIDINGNLHPD

SEQ ID NO: 20591 - protein, 14 aa, Severe acute respiratory syndrome coronavirus 2
  REGION 1..14: note = Table B: HLA-DRB3*02:01L HLA-DPA1*01:03-B1*04:02L HLA-DPA1*01:03-B1*104:01L
YIDINGNLHPDSAT

SEQ ID NO: 20592 - protein, 14 aa, Severe acute respiratory syndrome coronavirus 2
  REGION 1..14: note = Table B: HLA-DRB3*02:01L HLA-DRB4*01:01L HLA-DPA1*01:03-B1*04:02L
DAPYIVGDVVQEGV

SEQ ID NO: 20593 - protein, 15 aa, Severe acute respiratory syndrome coronavirus 2
  REGION 1..15: note = Table B: HLA-DRB3*02:01L
AKALRKVPTDNYITT

SEQ ID NO: 20594 - protein, 13 aa, Severe acute respiratory syndrome coronavirus 2
  REGION 1..13: note = Table B: HLA-DRB3*02:01L HLA-DRB1*11:01L HLA-DPA1*01:03-B1*04:02L HLA-DRB3*01:01L HLA-DPA1*01:03-B1*104:01L HLA-DPA1*01:02-B1*04:01L HLA-DRB1*07:01L HLA-DQA1*01:03-B1*06:01L HLA-DRB1*08:02L
KSAFYILPSIISN

SEQ ID NO: 20595 - protein, 16 aa, Severe acute respiratory syndrome coronavirus 2
  REGION 1..16: note = Table B: HLA-DRB3*02:01L HLA-DPA1*03:01-B1*04:02L HLA-DRB1*03:01L HLA-DRB1*11:02L HLA-DRB1*11:03L HLA-DQA1*01-B1*05L HLA-DPA1*01:03-B1*04:01L HLA-DRB1*09:01L
IQRKYKGIKIQEGVVD

SEQ ID NO: 20596 - protein, 12 aa, Severe acute respiratory syndrome coronavirus 2
  REGION 1..12: note = Table B: HLA-DRB3*02:01L HLA-DRB1*14:01L HLA-DRB1*14:02L HLA-DPA1*02:01-B1*13:01L
IQEGVVDYGARF

SEQ ID NO: 20597 - protein, 16 aa, Severe acute respiratory syndrome coronavirus 2
  REGION 1..16: note = Table B: HLA-DRB3*02:01L HLA-DRB4*01:01L
SKTTVASLINTLNDLN

SEQ ID NO: 20598 - protein, 14 aa, Severe acute respiratory syndrome coronavirus 2
  REGION 1..14: note = Table B: HLA-DRB3*02:01L HLA-DPA1*03:01-B1*04:02L
AVTAYNGYLTSSSK

SEQ ID NO: 20599 - protein, 15 aa, Severe acute respiratory syndrome coronavirus 2
  REGION 1..15: note = Table B: HLA-DRB3*02:01L HLA-DRB1*14:01L HLA-DRB1*11:01L HLA-DRB1*04:10L HLA-DRB3*01:01L HLA-DRB1*08:03L
AGSYKDWSYSGQSTQ

SEQ ID NO: 20600 - protein, 14 aa, Severe acute respiratory syndrome coronavirus 2
  REGION 1..14: note = Table B: HLA-DRB3*02:01L HLA-DRB3*01:01L
TTFHLDGEVITFDN

SEQ ID NO: 20601 - protein, 13 aa, Severe acute respiratory syndrome coronavirus 2
  REGION 1..13: note = Table B: HLA-DRB3*02:01L HLA-DPA1*03:01-B1*04:02L HLA-DRB1*08:03L
VDNINLHTQVVDM

SEQ ID NO: 20602 - protein, 15 aa, Severe acute respiratory syndrome coronavirus 2
  REGION 1..15: note = Table B: HLA-DRB3*02:01L HLA-DPA1*01:03-B1*03:01L HLA-DRB1*11:01L HLA-DRB1*07:01L
GPTYLDGADVTKIKP

SEQ ID NO: 20603 - protein, 17 aa, Severe acute respiratory syndrome coronavirus 2
  REGION 1..17: note = Table B: HLA-DRB3*02:01L HLA-DPA1*01:03-B1*104:01L
DPSFLGRYMSALNHTKK

SEQ ID NO: 20604 - protein, 13 aa, Severe acute respiratory syndrome coronavirus 2
  REGION 1..13: note = Table B: HLA-DRB3*02:01L
VGELGDVRETMSY

SEQ ID NO: 20605 - protein, 12 aa, Severe acute respiratory syndrome coronavirus 2
  REGION 1..12: note = Table B: HLA-DRB3*02:01L
QTTLKGVEAVMY

SEQ ID NO: 20606 - protein, 16 aa, Severe acute respiratory syndrome coronavirus 2
  REGION 1..16: note = Table B: HLA-DRB3*02:01L HLA-DPA1*03:01-B1*04:02L HLA-DRB1*11:02L HLA-DRB4*01:01L HLA-DPA1*02:01-B1*13:01L HLA-DPA1*01:03-B1*104:01L
ETLYCIDGALLTKSSE

SEQ ID NO: 20607 - protein, 17 aa, Severe acute respiratory syndrome coronavirus 2
  REGION 1..17: note = Table B: HLA-DRB3*02:01L HLA-DPA1*01:03-B1*04:01L HLA-DPA1*01:03-B1*104:01L HLA-DRB1*08:03L
DNYYKKDNSYFTEQPID

SEQ ID NO: 20608 - protein, 12 aa, Severe acute respiratory syndrome coronavirus 2
  REGION 1..12: note = Table B: HLA-DRB3*02:01L
LVPNQPYPNASF

SEQ ID NO: 20609 - protein, 15 aa, Severe acute respiratory syndrome coronavirus 2
  REGION 1..15: note = Table B: HLA-DRB3*02:01L HLA-DRB1*14:02L HLA-DPA1*02:01-B1*13:01L
ADDLNQLTGYKKPAS

SEQ ID NO: 20610 - protein, 13 aa, Severe acute respiratory syndrome coronavirus 2
  REGION 1..13: note = Table B: HLA-DRB3*02:01L HLA-DQA1*05:05-B1*03:01L
VWHVNNATNKATY

SEQ ID NO: 20611 - protein, 11 aa, Severe acute respiratory syndrome coronavirus 2
  REGION 1..11: note = Table B: HLA-DRB3*02:01L HLA-DRB1*14:54L
DIILKPANNSL

SEQ ID NO: 20612 - protein, 13 aa, Severe acute respiratory syndrome coronavirus 2
  REGION 1..13: note = Table B: HLA-DRB3*02:01L HLA-DQA1*01-B1*05L HLA-DQA1*05:05-B1*03:19L HLA-DPA1*02:01-B1*13:01L HLA-DQA1*05:05-B1*03:01L HLA-DRB1*07:01L
VLGLKTLATHGLA

SEQ ID NO: 20613 - protein, 12 aa, Severe acute respiratory syndrome coronavirus 2
  REGION 1..12: note = Table B: HLA-DRB3*02:01L HLA-DPA1*01:03-B1*03:01L HLA-DRB1*11:03L HLA-DRB1*11:04L HLA-DRB5*01:01L HLA-DQA1*05:01-B1*02:01L HLA-DRB1*04:10L HLA-DRB1*12:02L HLA-DQA1*05:05-B1*03:01L HLA-DRB1*07:01L HLA-DRB1*10:01L
  REGION 1..12: note = CONT. FROM ABOVE: HLA-DRB1*04:08L
GYLNSTNVTIAT

SEQ ID NO: 20614 - protein, 12 aa, Severe acute respiratory syndrome coronavirus 2
  REGION 1..12: note = Table B: HLA-DRB3*02:01L HLA-DQA1*01-B1*05L HLA-DQA1*05:05-B1*03:01L
TIQITISSFKWD

SEQ ID NO: 20615 - protein, 13 aa, Severe acute respiratory syndrome coronavirus 2
  REGION 1..13: note = Table B: HLA-DRB3*02:01L HLA-DRB1*11:02L
YYVWKSYVHVVDG

SEQ ID NO: 20616 - protein, 13 aa, Severe acute respiratory syndrome coronavirus 2
  REGION 1..13: note = Table B: HLA-DRB3*02:01L HLA-DPA1*03:01-B1*04:02L HLA-DQA1*01:01-B1*05:01L HLA-DQA1*05:05-B1*03:19L HLA-DPA1*01:03-B1*04:02L HLA-DPA1*01:03-B1*104:01L HLA-DPA1*01:02-B1*04:01L HLA-DRB1*08:02L
LSHFVNLDNLRAN

SEQ ID NO: 20617 - protein, 12 aa, Severe acute respiratory syndrome coronavirus 2
  REGION 1..12: note = Table B: HLA-DRB3*02:01L
EESSAKSASVYY

SEQ ID NO: 20618 - protein, 13 aa, Severe acute respiratory syndrome coronavirus 2
  REGION 1..13: note = Table B: HLA-DRB3*02:01L HLA-DRB1*14:54L
EVAVKMFDAYVNT

SEQ ID NO: 20619 - protein, 13 aa, Severe acute respiratory syndrome coronavirus 2
  REGION 1..13: note = Table B: HLA-DRB3*02:01L
VAVKMFDAYVNTF

SEQ ID NO: 20620 - protein, 14 aa, Severe acute respiratory syndrome coronavirus 2
  REGION 1..14: note = Table B: HLA-DRB3*02:01L HLA-DPA1*01:03-B1*03:01L
TAEAELAKNVSLDN

SEQ ID NO: 20621 - protein, 13 aa, Severe acute respiratory syndrome coronavirus 2
  REGION 1..13: note = Table B: HLA-DRB3*02:01L HLA-DRB1*03:01L HLA-DRB1*14:01L HLA-DRB1*08:01L HLA-DPA1*01:03-B1*104:01L HLA-DRB1*08:03L
FVDSDVETKDVVE

SEQ ID NO: 20622 - protein, 14 aa, Severe acute respiratory syndrome coronavirus 2
  REGION 1..14: note = Table B: HLA-DRB3*02:01L HLA-DPA1*01:03-B1*03:01L HLA-DRB1*03:01L HLA-DRB1*11:03L HLA-DRB1*14:02L HLA-DQA1*05:05-B1*03:19L HLA-DPA1*01:03-B1*04:02L HLA-DPA1*02:01-B1*13:01L HLA-DPA1*01:03-B1*02:01L
  REGION 1..14: note = CONT. FROM ABOVE: HLA-DRB1*07:01L
YMLTYNKVENMTPR

SEQ ID NO: 20623 - protein, 16 aa, Severe acute respiratory syndrome coronavirus 2
  REGION 1..16: note = Table B: HLA-DRB3*02:01L HLA-DPA1*01:03-B1*03:01L
ITPVHVMSKHTDFSSE

SEQ ID NO: 20624 - protein, 18 aa, Severe acute respiratory syndrome coronavirus 2
  REGION 1..18: note = Table B: HLA-DRB3*02:01L HLA-DPA1*01:03-B1*04:01L HLA-DRB1*09:01L HLA-DPA1*01:03-B1*104:01L
TPVHVMSKHTDFSSEIIG

SEQ ID NO: 20625 - protein, 18 aa, Severe acute respiratory syndrome coronavirus 2
  REGION 1..18: note = Table B: HLA-DRB3*02:01L HLA-DPA1*03:01-B1*04:02L HLA-DRB1*14:02L HLA-DPA1*01:03-B1*04:02L
VTRDIASTDTCFANKHAD

SEQ ID NO: 20626 - protein, 16 aa, Severe acute respiratory syndrome coronavirus 2
  REGION 1..16: note = Table B: HLA-DRB3*02:01L HLA-DRB1*10:01L
NGDFLHFLPRVFSAVG

SEQ ID NO: 20627 - protein, 14 aa, Severe acute respiratory syndrome coronavirus 2
  REGION 1..14: note = Table B: HLA-DRB3*02:01L HLA-DRB1*11:03L HLA-DRB1*11:01L HLA-DRB1*07:01L HLA-DRB1*10:01L
EGSVAYESLRPDTR

SEQ ID NO: 20628 - protein, 15 aa, Severe acute respiratory syndrome coronavirus 2
  REGION 1..15: note = Table B: HLA-DRB3*02:01L HLA-DRB1*07:01L
VRVVTTFDSEYCRHG

SEQ ID NO: 20629 - protein, 12 aa, Severe acute respiratory syndrome coronavirus 2
  REGION 1..12: note = Table B: HLA-DRB3*02:01L
YSFLPGVYSVIY

SEQ ID NO: 20630 - protein, 14 aa, Severe acute respiratory syndrome coronavirus 2
  REGION 1..14: note = Table B: HLA-DRB3*02:01L HLA-DRB3*01:01L
STKHFYWFFSNYLK

SEQ ID NO: 20631 - protein, 16 aa, Severe acute respiratory syndrome coronavirus 2
  REGION 1..16: note = Table B: HLA-DRB3*02:01L HLA-DPA1*01:03-B1*03:01L HLA-DRB1*11:02L HLA-DRB1*14:02L HLA-DQA1*05:05-B1*03:01L
KHFYWFFSNYLKRRVV

SEQ ID NO: 20632 - protein, 12 aa, Severe acute respiratory syndrome coronavirus 2
  REGION 1..12: note = Table B: HLA-DRB3*02:01L HLA-DRB1*14:01L HLA-DPA1*01:03-B1*104:01L HLA-DQA1*05:05-B1*03:01L HLA-DRB1*04:08L
RVVFNGVSFSTF

SEQ ID NO: 20633 - protein, 12 aa, Severe acute respiratory syndrome coronavirus 2
  REGION 1..12: note = Table B: HLA-DRB3*02:01L HLA-DQA1*03:01-B1*03:02L HLA-DQA1*05:05-B1*03:01L HLA-DRB1*04:08L
VVFNGVSFSTFE

SEQ ID NO: 20634 - protein, 16 aa, Severe acute respiratory syndrome coronavirus 2
  REGION 1..16: note = Table B: HLA-DRB3*02:01L HLA-DRB1*11:04L HLA-DRB1*11:01L
YLKLRSDVLLPLTQYN

SEQ ID NO: 20635 - protein, 13 aa, Severe acute respiratory syndrome coronavirus 2
  REGION 1..13: note = Table B: HLA-DRB3*02:01L
YKYFSGAMDTTSY

SEQ ID NO: 20636 - protein, 12 aa, Severe acute respiratory syndrome coronavirus 2
  REGION 1..12: note = Table B: HLA-DRB3*02:01L
VRIQPGQTFSVL

SEQ ID NO: 20637 - protein, 15 aa, Severe acute respiratory syndrome coronavirus 2
  REGION 1..15: note = Table B: HLA-DRB3*02:01L HLA-DRB1*12:02L
LPTGVHAGTDLEGNF

SEQ ID NO: 20638 - protein, 16 aa, Severe acute respiratory syndrome coronavirus 2
  REGION 1..16: note = Table B: HLA-DRB3*02:01L HLA-DRB1*14:02L HLA-DPA1*01:03-B1*104:01L
GTDLEGNFYGPFVDRQ

SEQ ID NO: 20639 - protein, 13 aa, Severe acute respiratory syndrome coronavirus 2
  REGION 1..13: note = Table B: HLA-DRB3*02:01L
AWLYAAVINGDRW

SEQ ID NO: 20640 - protein, 13 aa, Severe acute respiratory syndrome coronavirus 2
  REGION 1..13: note = Table B: HLA-DRB3*02:01L HLA-DPA1*01:03-B1*04:01L HLA-DPA1*01:03-B1*04:02L
FLNRFTTTLNDFN

SEQ ID NO: 20641 - protein, 16 aa, Severe acute respiratory syndrome coronavirus 2
  REGION 1..16: note = Table B: HLA-DRB3*02:01L HLA-DRB1*08:02L
LNDFNLVAMKYNYEPL

SEQ ID NO: 20642 - protein, 14 aa, Severe acute respiratory syndrome coronavirus 2
  REGION 1..14: note = Table B: HLA-DRB3*02:01L HLA-DRB1*11:03L HLA-DRB1*14:02L HLA-DQA1*01:01-B1*05:01L HLA-DQA1*05:05-B1*03:19L HLA-DRB1*12:02L HLA-DPA1*01:03-B1*104:01L HLA-DQA1*05:05-B1*03:01L HLA-DRB1*07:01L HLA-DRB1*10:01L
VAMKYNYEPLTQDH

SEQ ID NO: 20643 - protein, 17 aa, Severe acute respiratory syndrome coronavirus 2
  REGION 1..17: note = Table B: HLA-DRB3*02:01L
NGRTILGSALLEDEFTP

SEQ ID NO: 20644 - protein, 14 aa, Severe acute respiratory syndrome coronavirus 2
  REGION 1..14: note = Table B: HLA-DRB3*02:01L HLA-DRB1*03:01L HLA-DRB1*11:02L HLA-DPA1*01:03-B1*02:01L
LGVYDYLVSTQEFR

SEQ ID NO: 20645 - protein, 13 aa, Severe acute respiratory syndrome coronavirus 2
  REGION 1..13: note = Table B: HLA-DRB3*02:01L
NDILLAKDTTEAF

SEQ ID NO: 20646 - protein, 13 aa, Severe acute respiratory syndrome coronavirus 2
  REGION 1..13: note = Table B: HLA-DRB3*02:01L HLA-DPA1*03:01-B1*04:02L HLA-DRB1*14:01L HLA-DRB1*11:03L HLA-DRB1*08:01L HLA-DPA1*01:03-B1*04:02L HLA-DRB1*12:02L HLA-DPA1*01:02-B1*04:01L HLA-DRB1*07:01L HLA-DRB1*10:01L
  REGION 1..13: note = CONT. FROM ABOVE: HLA-DRB1*15:03L
LDNRATLQAIASE

SEQ ID NO: 20647 - protein, 14 aa, Severe acute respiratory syndrome coronavirus 2
  REGION 1..14: note = Table B: HLA-DRB3*02:01L
IASEFSSLPSYAAF

SEQ ID NO: 20648 - protein, 14 aa, Severe acute respiratory syndrome coronavirus 2
  REGION 1..14: note = Table B: HLA-DRB3*02:01L HLA-DRB1*08:01L HLA-DPA1*01:03-B1*04:02L HLA-DRB1*12:02L HLA-DRB3*01:01L HLA-DRB1*07:01L HLA-DRB1*08:02L
ASEFSSLPSYAAFA

SEQ ID NO: 20649 - protein, 15 aa, Severe acute respiratory syndrome coronavirus 2
  REGION 1..15: note = Table B: HLA-DRB3*02:01L HLA-DRB1*08:01L HLA-DPA1*01:03-B1*04:02L HLA-DPA1*02:01-B1*13:01L HLA-DRB1*08:02L
NNIINNARDGCVPLN

SEQ ID NO: 20650 - protein, 17 aa, Severe acute respiratory syndrome coronavirus 2
  REGION 1..17: note = Table B: HLA-DRB3*02:01L
SPVALRQMSCAAGTTQT

SEQ ID NO: 20651 - protein, 14 aa, Severe acute respiratory syndrome coronavirus 2
  REGION 1..14: note = Table B: HLA-DRB3*02:01L
DDNALAYYNTTKGG

SEQ ID NO: 20652 - protein, 19 aa, Severe acute respiratory syndrome coronavirus 2
  REGION 1..19: note = Table B: HLA-DRB3*02:01L HLA-DRB1*14:54L
DTPKGPKVKYLYFIKGLNN

SEQ ID NO: 20653 - protein, 14 aa, Severe acute respiratory syndrome coronavirus 2
  REGION 1..14: note = Table B: HLA-DRB3*02:01L HLA-DPA1*03:01-B1*04:02L HLA-DPA1*01:03-B1*02:01L HLA-DPA1*01:03-B1*104:01L
GSLAATVRLQAGNA

SEQ ID NO: 20654 - protein, 16 aa, Severe acute respiratory syndrome coronavirus 2
  REGION 1..16: note = Table B: HLA-DRB3*02:01L HLA-DRB1*15:01L
NSTVLSFCAFAVDAAK

SEQ ID NO: 20655 - protein, 14 aa, Severe acute respiratory syndrome coronavirus 2
  REGION 1..14: note = Table B: HLA-DRB3*02:01L HLA-DRB1*08:01L
VDAAKAYKDYLASG

SEQ ID NO: 20656 - protein, 16 aa, Severe acute respiratory syndrome coronavirus 2
  REGION 1..16: note = Table B: HLA-DRB3*02:01L HLA-DPA1*03:01-B1*04:02L HLA-DRB1*03:01L HLA-DRB1*11:02L HLA-DRB1*14:02L HLA-DPA1*01:03-B1*04:01L HLA-DRB1*09:01L HLA-DPA1*01:02-B1*04:01L HLA-DRB1*07:01L HLA-DRB1*08:02L
GKYVQIPTTCANDPVG

SEQ ID NO: 20657 - protein, 13 aa, Severe acute respiratory syndrome coronavirus 2
  REGION 1..13: note = Table B: HLA-DRB3*02:01L HLA-DRB1*11:03L
ILRVYANLGERVR

SEQ ID NO: 20658 - protein, 18 aa, Severe acute respiratory syndrome coronavirus 2
  REGION 1..18: note = Table B: HLA-DRB3*02:01L
TEERLKLFDRYFKYWDQT

SEQ ID NO: 20659 - protein, 16 aa, Severe acute respiratory syndrome coronavirus 2
  REGION 1..16: note = Table B: HLA-DRB3*02:01L HLA-DRB4*01:01L HLA-DQA1*05:05-B1*03:116L HLA-DPA1*01:03-B1*104:01L HLA-DQA1*05:05-B1*03:01L HLA-DRB1*08:02L
SGNLLLDKRTTCFSVA

SEQ ID NO: 20660 - protein, 14 aa, Severe acute respiratory syndrome coronavirus 2
  REGION 1..14: note = Table B: HLA-DRB3*02:01L HLA-DPA1*01:03-B1*03:01L
VAALTNNVAFQTVK

SEQ ID NO: 20661 - protein, 11 aa, Severe acute respiratory syndrome coronavirus 2
  REGION 1..11: note = Table B: HLA-DRB3*02:01L HLA-DPA1*01:03-B1*104:01L HLA-DRB1*07:01L
VAFQTVKPGNF

SEQ ID NO: 20662 - protein, 12 aa, Severe acute respiratory syndrome coronavirus 2
  REGION 1..12: note = Table B: HLA-DRB3*02:01L HLA-DRB1*09:01L
DFYDFAVSKGFF

SEQ ID NO: 20663 - protein, 14 aa, Severe acute respiratory syndrome coronavirus 2
  REGION 1..14: note = Table B: HLA-DRB3*02:01L HLA-DRB3*01:01L
FYDFAVSKGFFKEG

SEQ ID NO: 20664 - protein, 15 aa, Severe acute respiratory syndrome coronavirus 2
  REGION 1..15: note = Table B: HLA-DRB3*02:01L HLA-DRB1*08:01L
DGNAAISDYDYYRYN

SEQ ID NO: 20665 - protein, 16 aa, Severe acute respiratory syndrome coronavirus 2
  REGION 1..16: note = Table B: HLA-DRB3*02:01L HLA-DPA1*03:01-B1*04:02L HLA-DRB1*03:01L HLA-DRB1*11:03L HLA-DQA1*05:01-B1*02:01L HLA-DRB1*13:01L HLA-DPA1*01:03-B1*02:01L HLA-DPA1*01:03-B1*104:01L HLA-DRB1*07:01L
GFPFNKWGKARLYYDS

SEQ ID NO: 20666 - protein, 18 aa, Severe acute respiratory syndrome coronavirus 2
  REGION 1..18: note = Table B: HLA-DRB3*02:01L HLA-DPA1*01:03-B1*03:01L HLA-DPA1*03:01-B1*04:02L HLA-DRB1*11:02L HLA-DQA1*05:05-B1*03:19L HLA-DPA1*01:03-B1*04:02L HLA-DPA1*01:03-B1*104:01L
MPNMLRIMASLVLARKHT

SEQ ID NO: 20667 - protein, 12 aa, Severe acute respiratory syndrome coronavirus 2
  REGION 1..12: note = Table B: HLA-DRB3*02:01L HLA-DRB1*11:04L
DKYVRNLQHRLY

SEQ ID NO: 20668 - protein, 18 aa, Severe acute respiratory syndrome coronavirus 2
  REGION 1..18: note = Table B: HLA-DRB3*02:01L
DVDTDFVNEFYAYLRKHF

SEQ ID NO: 20669 - protein, 18 aa, Severe acute respiratory syndrome coronavirus 2
  REGION 1..18: note = Table B: HLA-DRB3*02:01L HLA-DQA1*01-B1*05L HLA-DRB4*01:01L HLA-DQA1*05:05-B1*03:116L HLA-DRB1*09:01L HLA-DRB1*15:01L
GPHEFCSQHTMLVKQGDD

SEQ ID NO: 20670 - protein, 12 aa, Severe acute respiratory syndrome coronavirus 2
  REGION 1..12: note = Table B: HLA-DRB3*02:01L HLA-DRB1*15:01L
VYLPYPDPSRIL

SEQ ID NO: 20671 - protein, 17 aa, Severe acute respiratory syndrome coronavirus 2
  REGION 1..17: note = Table B: HLA-DRB3*02:01L
DAYPLTKHPNQEYADVF

SEQ ID NO: 20672 - protein, 14 aa, Severe acute respiratory syndrome coronavirus 2
  REGION 1..14: note = Table B: HLA-DRB3*02:01L HLA-DRB1*13:01L HLA-DPA1*01:03-B1*02:01L HLA-DRB1*08:03L
MLTNDNTSRYWEPE

SEQ ID NO: 20673 - protein, 15 aa, Severe acute respiratory syndrome coronavirus 2
  REGION 1..15: note = Table B: HLA-DRB3*02:01L
DNTSRYWEPEFYEAM

SEQ ID NO: 20674 - protein, 13 aa, Severe acute respiratory syndrome coronavirus 2
  REGION 1..13: note = Table B: HLA-DRB3*02:01L HLA-DRB1*14:02L HLA-DPA1*01:03-B1*04:02L
GDYILANTCTERL

SEQ ID NO: 20675 - protein, 15 aa, Severe acute respiratory syndrome coronavirus 2
  REGION 1..15: note = Table B: HLA-DRB3*02:01L HLA-DPA1*01:03-B1*04:02L
YRVTKNSKVQIGEYT

SEQ ID NO: 20676 - protein, 12 aa, Severe acute respiratory syndrome coronavirus 2
  REGION 1..12: note = Table B: HLA-DRB3*02:01L HLA-DRB1*11:03L HLA-DRB3*01:01L
DKFKVNSTLEQY

SEQ ID NO: 20677 - protein, 14 aa, Severe acute respiratory syndrome coronavirus 2
  REGION 1..14: note = Table B: HLA-DRB3*02:01L HLA-DPA1*01:03-B1*03:01L HLA-DRB1*14:02L HLA-DRB1*08:01L HLA-DPA1*02:01-B1*13:01L
EQYVFCTVNALPET

SEQ ID NO: 20678 - protein, 18 aa, Severe acute respiratory syndrome coronavirus 2
  REGION 1..18: note = Table B: HLA-DRB3*02:01L
LPAPRTLLTKGTLEPEYF

SEQ ID NO: 20679 - protein, 14 aa, Severe acute respiratory syndrome coronavirus 2
  REGION 1..14: note = Table B: HLA-DRB3*02:01L HLA-DRB5*01:01L HLA-DPA1*01:03-B1*04:02L HLA-DRB1*12:02L HLA-DRB1*08:02L HLA-DRB1*15:01L
SALVYDNKLKAHKD

SEQ ID NO: 20680 - protein, 13 aa, Severe acute respiratory syndrome coronavirus 2
  REGION 1..13: note = Table B: HLA-DRB3*02:01L HLA-DPA1*03:01-B1*04:02L HLA-DRB1*11:03L HLA-DRB1*14:02L HLA-DRB1*09:01L
GVNLVAVPTGYVD

SEQ ID NO: 20681 - protein, 15 aa, Severe acute respiratory syndrome coronavirus 2
  REGION 1..15: note = Table B: HLA-DRB3*02:01L HLA-DPA1*03:01-B1*04:02L HLA-DRB1*11:03L HLA-DRB1*14:02L HLA-DRB1*08:01L HLA-DPA1*01:03-B1*104:01L
VNLVAVPTGYVDTPN

SEQ ID NO: 20682 - protein, 14 aa, Severe acute respiratory syndrome coronavirus 2
  REGION 1..14: note = Table B: HLA-DRB3*02:01L HLA-DPA1*03:01-B1*04:02L HLA-DRB1*14:01L HLA-DPA1*01:03-B1*104:01L
DVQQWGFTGNLQSN

SEQ ID NO: 20683 - protein, 15 aa, Severe acute respiratory syndrome coronavirus 2
  REGION 1..15: note = Table B: HLA-DRB3*02:01L HLA-DRB1*03:01L HLA-DRB1*11:02L HLA-DRB4*01:01L HLA-DPA1*01:03-B1*04:01L HLA-DQA1*05:05-B1*03:116L HLA-DRB1*09:01L HLA-DRB1*08:02L
VQQWGFTGNLQSNHD

SEQ ID NO: 20684 - protein, 18 aa, Severe acute respiratory syndrome coronavirus 2
  REGION 1..18: note = Table B: HLA-DRB3*02:01L HLA-DRB1*11:02L HLA-DRB1*11:03L HLA-DRB1*09:01L HLA-DRB1*10:01L HLA-DRB1*08:02L HLA-DRB1*08:03L
VNKHAFHTPAFDKSAFVN

SEQ ID NO: 20685 - protein, 12 aa, Severe acute respiratory syndrome coronavirus 2
  REGION 1..12: note = Table B: HLA-DRB3*02:01L HLA-DRB1*11:03L HLA-DRB1*12:02L HLA-DRB1*14:54L
EVPVSIINNTVY

SEQ ID NO: 20686 - protein, 13 aa, Severe acute respiratory syndrome coronavirus 2
  REGION 1..13: note = Table B: HLA-DRB3*02:01L HLA-DPA1*01:03-B1*03:01L HLA-DQA1*05:05-B1*03:01L HLA-DRB1*07:01L
NIKPVPEVKILNN

SEQ ID NO: 20687 - protein, 17 aa, Severe acute respiratory syndrome coronavirus 2
  REGION 1..17: note = Table B: HLA-DRB3*02:01L HLA-DRB1*14:02L
APAHISTIGVCSMTDIA

SEQ ID NO: 20688 - protein, 14 aa, Severe acute respiratory syndrome coronavirus 2
  REGION 1..14: note = Table B: HLA-DRB3*02:01L HLA-DRB1*03:01L HLA-DRB1*11:02L HLA-DRB1*08:01L HLA-DRB5*01:01L HLA-DRB4*01:01L HLA-DPA1*01:03-B1*04:02L HLA-DRB3*01:01L HLA-DPA1*02:01-B1*13:01L HLA-DPA1*01:03-B1*104:01L
  REGION 1..14: note = CONT. FROM ABOVE: HLA-DRB1*07:01L HLA-DRB1*08:02L
GVLITEGSVKGLQP

SEQ ID NO: 20689 - protein, 11 aa, Severe acute respiratory syndrome coronavirus 2
  REGION 1..11: note = Table B: HLA-DRB3*02:01L HLA-DRB1*12:02L HLA-DRB1*07:01L
GVVQQLPETYF

SEQ ID NO: 20690 - protein, 11 aa, Severe acute respiratory syndrome coronavirus 2
  REGION 1..11: note = Table B: HLA-DRB3*02:01L HLA-DRB1*14:17L
VVQQLPETYFT

SEQ ID NO: 20691 - protein, 15 aa, Severe acute respiratory syndrome coronavirus 2
  REGION 1..15: note = Table B: HLA-DRB3*02:01L HLA-DPA1*01:03-B1*04:01L HLA-DPA1*01:03-B1*02:01L HLA-DQA1*05:05-B1*03:01L
DEFIERYKLEGYAFE

SEQ ID NO: 20692 - protein, 12 aa, Severe acute respiratory syndrome coronavirus 2
  REGION 1..12: note = Table B: HLA-DRB3*02:01L
DFIPMDSTVKNY

SEQ ID NO: 20693 - protein, 16 aa, Severe acute respiratory syndrome coronavirus 2
  REGION 1..16: note = Table B: HLA-DRB3*02:01L HLA-DRB1*04:08L
IPMDSTVKNYFITDAQ

SEQ ID NO: 20694 - protein, 13 aa, Severe acute respiratory syndrome coronavirus 2
  REGION 1..13: note = Table B: HLA-DRB3*02:01L HLA-DRB3*01:01L
VVKVTIDYTEISF

SEQ ID NO: 20695 - protein, 18 aa, Severe acute respiratory syndrome coronavirus 2
  REGION 1..18: note = Table B: HLA-DRB3*02:01L HLA-DQA1*05:05-B1*03:116L
SSEAFLIGCNYLGKPREQ

SEQ ID NO: 20696 - protein, 12 aa, Severe acute respiratory syndrome coronavirus 2
  REGION 1..12: note = Table B: HLA-DRB3*02:01L HLA-DRB1*04:08L
WRNTNPIQLSSY

SEQ ID NO: 20697 - protein, 14 aa, Severe acute respiratory syndrome coronavirus 2
  REGION 1..14: note = Table B: HLA-DRB3*02:01L HLA-DPA1*01:03-B1*03:01L HLA-DRB1*14:02L HLA-DPA1*01:03-B1*04:01L HLA-DRB1*07:01L
SSYSLFDMSKFPLK

SEQ ID NO: 20698 - protein, 12 aa, Severe acute respiratory syndrome coronavirus 2
  REGION 1..12: note = Table B: HLA-DRB3*02:01L HLA-DRB1*14:17L HLA-DRB1*04:08L
NPVLPFNDGVYF

SEQ ID NO: 20699 - protein, 19 aa, Severe acute respiratory syndrome coronavirus 2
  REGION 1..19: note = Table B: HLA-DRB3*02:01L
DPFLGVYYHKNNKSWMESE

SEQ ID NO: 20700 - protein, 16 aa, Severe acute respiratory syndrome coronavirus 2
  REGION 1..16: note = Table B: HLA-DRB3*02:01L HLA-DQA1*05:05-B1*03:116L HLA-DRB1*08:02L
FEYVSQPFLMDLEGKQ

SEQ ID NO: 20701 - protein, 16 aa, Severe acute respiratory syndrome coronavirus 2
  REGION 1..16: note = Table B: HLA-DRB3*02:01L HLA-DRB1*14:02L HLA-DQA1*05:01-B1*02:01L
QGNFKNLREFVFKNID

SEQ ID NO: 20702 - protein, 17 aa, Severe acute respiratory syndrome coronavirus 2
  REGION 1..17: note = Table B: HLA-DRB3*02:01L HLA-DRB1*03:01L HLA-DRB1*13:01L HLA-DPA1*01:03-B1*04:01L HLA-DRB1*07:01L HLA-DRB1*10:01L
FQTLLALHRSYLTPGDS

SEQ ID NO: 20703 - protein, 13 aa, Severe acute respiratory syndrome coronavirus 2
  REGION 1..13: note = Table B: HLA-DRB3*02:01L
FNATRFASVYAWN

SEQ ID NO: 20704 - protein, 16 aa, Severe acute respiratory syndrome coronavirus 2
  REGION 1..16: note = Table B: HLA-DRB3*02:01L HLA-DPA1*03:01-B1*04:02L HLA-DRB1*11:02L HLA-DRB1*14:02L HLA-DPA1*01:03-B1*04:02L
ATRFASVYAWNRKRIS

SEQ ID NO: 20705 - protein, 14 aa, Severe acute respiratory syndrome coronavirus 2
  REGION 1..14: note = Table B: HLA-DRB3*02:01L HLA-DRB1*11:02L HLA-DRB1*14:02L HLA-DQA1*01:01-B1*05:01L HLA-DRB1*08:01L HLA-DRB1*11:01L HLA-DRB1*09:01L HLA-DRB3*01:01L HLA-DPA1*01:03-B1*02:01L HLA-DRB1*07:01L HLA-DRB1*08:02L
VADYSVLYNSASFS

SEQ ID NO: 20706 - protein, 12 aa, Severe acute respiratory syndrome coronavirus 2
  REGION 1..12: note = Table B: HLA-DRB3*02:01L
SVLYNSASFSTF

SEQ ID NO: 20707 - protein, 15 aa, Severe acute respiratory syndrome coronavirus 2
  REGION 1..15: note = Table B: HLA-DRB3*02:01L
IAWNSNNLDSKVGGN

SEQ ID NO: 20708 - protein, 12 aa, Severe acute respiratory syndrome coronavirus 2
  REGION 1..12: note = Table B: HLA-DRB3*02:01L
SNNLDSKVGGNY

SEQ ID NO: 20709 - protein, 13 aa, Severe acute respiratory syndrome coronavirus 2
  REGION 1..13: note = Table B: HLA-DRB3*02:01L
GFQPTNGVGYQPY

SEQ ID NO: 20710 - protein, 16 aa, Severe acute respiratory syndrome coronavirus 2
  REGION 1..16: note = Table B: HLA-DRB3*02:01L HLA-DPA1*01:03-B1*03:01L HLA-DRB1*11:02L HLA-DRB1*11:01L HLA-DQA1*05:01-B1*02:01L HLA-DQA1*05:05-B1*03:01L
NKKFLPFQQFGRDIAD

SEQ ID NO: 20711 - protein, 15 aa, Severe acute respiratory syndrome coronavirus 2
  REGION 1..15: note = Table B: HLA-DRB3*02:01L HLA-DPA1*01:03-B1*03:01L HLA-DQA1*01:01-B1*05:01L HLA-DPA1*01:03-B1*104:01L
LPFQQFGRDIADTTD

SEQ ID NO: 20712 - protein, 15 aa, Severe acute respiratory syndrome coronavirus 2
  REGION 1..15: note = Table B: HLA-DRB3*02:01L HLA-DRB1*11:01L
IIAYTMSLGAENSVA

SEQ ID NO: 20713 - protein, 13 aa, Severe acute respiratory syndrome coronavirus 2
  REGION 1..13: note = Table B: HLA-DRB3*02:01L
EILPVSMTKTSVD

SEQ ID NO: 20714 - protein, 14 aa, Severe acute respiratory syndrome coronavirus 2
  REGION 1..14: note = Table B: HLA-DRB3*02:01L
LNRALTGIAVEQDK

SEQ ID NO: 20715 - protein, 13 aa, Severe acute respiratory syndrome coronavirus 2
  REGION 1..13: note = Table B: HLA-DRB3*02:01L HLA-DRB3*01:01L HLA-DPA1*01:03-B1*104:01L
RALTGIAVEQDKN

SEQ ID NO: 20716 - protein, 12 aa, Severe acute respiratory syndrome coronavirus 2
  REGION 1..12: note = Table B: HLA-DRB3*02:01L HLA-DQA1*05:05-B1*03:01L
AVEQDKNTQEVF

SEQ ID NO: 20717 - protein, 20 aa, Severe acute respiratory syndrome coronavirus 2
  REGION 1..20: note = Table B: HLA-DRB3*02:01L
PDPSKPSKRSFIEDLLFNKV

SEQ ID NO: 20718 - protein, 14 aa, Severe acute respiratory syndrome coronavirus 2
  REGION 1..14: note = Table B: HLA-DRB3*02:01L HLA-DRB1*11:02L HLA-DRB1*08:03L
VLYENQKLIANQFN

SEQ ID NO: 20719 - protein, 12 aa, Severe acute respiratory syndrome coronavirus 2
  REGION 1..12: note = Table B: HLA-DRB3*02:01L HLA-DRB1*04:10L HLA-DRB1*07:01L HLA-DRB1*10:01L HLA-DRB1*04:08L
DVVNQNAQALNT

SEQ ID NO: 20720 - protein, 14 aa, Severe acute respiratory syndrome coronavirus 2
  REGION 1..14: note = Table B: HLA-DRB3*02:01L HLA-DPA1*03:01-B1*04:02L HLA-DRB1*14:02L HLA-DPA1*02:01-B1*13:01L
VKQLSSNFGAISSV

SEQ ID NO: 20721 - protein, 13 aa, Severe acute respiratory syndrome coronavirus 2
  REGION 1..13: note = Table B: HLA-DRB3*02:01L HLA-DPA1*03:01-B1*04:02L HLA-DRB1*03:01L HLA-DRB1*11:02L HLA-DRB1*13:01L HLA-DRB4*01:01L HLA-DPA1*01:03-B1*04:02L HLA-DPA1*02:01-B1*13:01L HLA-DPA1*01:03-B1*02:01L HLA-DRB1*08:02L HLA-DRB1*15:01L
AEIRASANLAATK

SEQ ID NO: 20722 - protein, 13 aa, Severe acute respiratory syndrome coronavirus 2
  REGION 1..13: note = Table B: HLA-DRB3*02:01L HLA-DPA1*02:01-B1*13:01L
EIRASANLAATKM

SEQ ID NO: 20723 - protein, 15 aa, Severe acute respiratory syndrome coronavirus 2
  REGION 1..15: note = Table B: HLA-DRB3*02:01L HLA-DRB1*14:02L HLA-DRB1*11:01L HLA-DRB3*01:01L HLA-DRB1*10:01L HLA-DRB1*08:03L
VVFLHVTYVPAQEKN

SEQ ID NO: 20724 - protein, 12 aa, Severe acute respiratory syndrome coronavirus 2
  REGION 1..12: note = Table B: HLA-DRB3*02:01L
HVTYVPAQEKNF

SEQ ID NO: 20725 - protein, 17 aa, Severe acute respiratory syndrome coronavirus 2
  REGION 1..17: note = Table B: HLA-DRB3*02:01L HLA-DPA1*03:01-B1*04:02L HLA-DRB1*14:01L HLA-DQA1*01:01-B1*05:01L HLA-DRB1*08:01L HLA-DRB1*11:01L HLA-DPA1*01:03-B1*04:02L HLA-DPA1*01:02-B1*04:01L
VPAQEKNFTTAPAICHD

SEQ ID NO: 20726 - protein, 16 aa, Severe acute respiratory syndrome coronavirus 2
  REGION 1..16: note = Table B: HLA-DRB3*02:01L HLA-DPA1*03:01-B1*04:02L HLA-DRB1*11:02L HLA-DQA1*05:05-B1*03:19L HLA-DRB4*01:01L HLA-DPA1*01:03-B1*04:02L HLA-DQA1*05:05-B1*03:01L HLA-DQA1*01:03-B1*06:01L
APAICHDGKAHFPREG

SEQ ID NO: 20727 - protein, 11 aa, Severe acute respiratory syndrome coronavirus 2
  REGION 1..11: note = Table B: HLA-DRB3*02:01L HLA-DRB1*09:01L HLA-DPA1*01:03-B1*104:01L
GVFVSNGTHWF

SEQ ID NO: 20728 - protein, 16 aa, Severe acute respiratory syndrome coronavirus 2
  REGION 1..16: note = Table B: HLA-DRB3*02:01L HLA-DRB1*11:04L HLA-DRB1*14:02L HLA-DPA1*01:03-B1*04:01L HLA-DPA1*01:03-B1*04:02L HLA-DRB1*07:01L HLA-DRB1*10:01L
DPLQPELDSFKEELDK

SEQ ID NO: 20729 - protein, 12 aa, Severe acute respiratory syndrome coronavirus 2
  REGION 1..12: note = Table B: HLA-DRB3*02:01L
DGTTSPISEHDY

SEQ ID NO: 20730 - protein, 14 aa, Severe acute respiratory syndrome coronavirus 2
  REGION 1..14: note = Table B: HLA-DRB3*02:01L HLA-DQA1*01:01-B1*05:01L HLA-DRB1*04:10L HLA-DRB1*04:08L HLA-DRB1*08:03L
DYQIGGYTEKWESG

SEQ ID NO: 20731 - protein, 12 aa, Severe acute respiratory syndrome coronavirus 2
  REGION 1..12: note = Table B: HLA-DRB3*02:01L HLA-DRB1*11:03L HLA-DRB1*14:02L HLA-DRB1*11:01L HLA-DQA1*05:05-B1*03:19L HLA-DPA1*01:03-B1*04:01L HLA-DPA1*01:03-B1*02:01L HLA-DRB1*08:02L
FFIYNKIVDEPE

SEQ ID NO: 20732 - protein, 18 aa, Severe acute respiratory syndrome coronavirus 2
  REGION 1..18: note = Table B: HLA-DRB3*02:01L HLA-DRB1*03:01L HLA-DRB1*11:02L HLA-DRB1*08:02L
EHVQIHTIDGSSGVVNPV

SEQ ID NO: 20733 - protein, 12 aa, Severe acute respiratory syndrome coronavirus 2
  REGION 1..12: note = Table B: HLA-DRB3*02:01L HLA-DRB1*04:08L
NIVNVSLVKPSF

SEQ ID NO: 20734 - protein, 11 aa, Severe acute respiratory syndrome coronavirus 2
  REGION 1..11: note = Table B: HLA-DRB3*02:01L
VNVSLVKPSFY

SEQ ID NO: 20735 - protein, 15 aa, Severe acute respiratory syndrome coronavirus 2
  REGION 1..15: note = Table B: HLA-DRB3*02:01L HLA-DRB1*04:10L
ASQRVAGDSGFAAYS

SEQ ID NO: 20736 - protein, 13 aa, Severe acute respiratory syndrome coronavirus 2
  REGION 1..13: note = Table B: HLA-DRB3*02:01L HLA-DPA1*03:01-B1*04:02L HLA-DRB1*11:03L HLA-DRB1*14:02L HLA-DPA1*01:03-B1*04:02L HLA-DPA1*02:01-B1*13:01L HLA-DRB1*14:54L HLA-DPA1*01:03-B1*02:01L HLA-DRB1*08:02L HLA-DRB1*08:03L
DSGFAAYSRYRIG

SEQ ID NO: 20737 - protein, 17 aa, Severe acute respiratory syndrome coronavirus 2
  REGION 1..17: note = Table B: HLA-DRB3*02:01L HLA-DRB1*08:03L
SKSLTENKYSQLDEEQP

SEQ ID NO: 20738 - protein, 15 aa, Severe acute respiratory syndrome coronavirus 2
  REGION 1..15: note = Table B: HLA-DRB3*02:01L
SPKLFIRQEEVQELY

SEQ ID NO: 20739 - protein, 16 aa, Severe acute respiratory syndrome coronavirus 2
  REGION 1..16: note = Table B: HLA-DRB3*02:01L HLA-DRB1*11:03L HLA-DRB1*14:02L
ATKAYNVTQAFGRRGP

SEQ ID NO: 20740 - protein, 15 aa, Severe acute respiratory syndrome coronavirus 2
  REGION 1..15: note = Table B: HLA-DRB3*02:01L HLA-DRB1*11:04L
APSASAFFGMSRIGM

SEQ ID NO: 20741 - protein, 15 aa, Severe acute respiratory syndrome coronavirus 2
  REGION 1..15: note = Table B: HLA-DRB3*02:01L
GMSRIGMEVTPSGTW

SEQ ID NO: 20742 - protein, 16 aa, Severe acute respiratory syndrome coronavirus 2
  REGION 1..16: note = Table B: HLA-DRB3*02:01L
NKHIDAYKTFPPTEPK

SEQ ID NO: 20743 - protein, 18 aa, Severe acute respiratory syndrome coronavirus 2
  REGION 1..18: note = Table B: HLA-DRB3*02:01L
LPAADLDDFSKQLQQSMS

SEQ ID NO: 20744 - protein, 14 aa, Severe acute respiratory syndrome coronavirus 2
  REGION 1..14: note = Table B: HLA-DPA1*01:03-B1*03:01L HLA-DQA1*01:01-B1*05:01L HLA-DRB1*16:01L HLA-DRB1*04:08L
VEVEKGVLPQLEQP

SEQ ID NO: 20745 - protein, 17 aa, Severe acute respiratory syndrome coronavirus 2
  REGION 1..17: note = Table B: HLA-DPA1*01:03-B1*03:01L HLA-DPA1*01:03-B1*104:01L HLA-DQA1*01:03-B1*06:01L
EQPYVFIKRSDARTAPH

SEQ ID NO: 20746 - protein, 18 aa, Severe acute respiratory syndrome coronavirus 2
  REGION 1..18: note = Table B: HLA-DPA1*01:03-B1*03:01L
QPYVFIKRSDARTAPHGH

SEQ ID NO: 20747 - protein, 14 aa, Severe acute respiratory syndrome coronavirus 2
  REGION 1..14: note = Table B: HLA-DPA1*01:03-B1*03:01L
HGHVMVELVAELEG

SEQ ID NO: 20748 - protein, 13 aa, Severe acute respiratory syndrome coronavirus 2
  REGION 1..13: note = Table B: HLA-DPA1*01:03-B1*03:01L HLA-DPA1*02:01-B1*13:01L
LGDELGTDPYEDF

SEQ ID NO: 20749 - protein, 12 aa, Severe acute respiratory syndrome coronavirus 2
  REGION 1..12: note = Table B: HLA-DPA1*01:03-B1*03:01L HLA-DRB1*11:02L HLA-DQA1*05:05-B1*03:19L HLA-DPA1*01:03-B1*104:01L HLA-DRB1*16:01L
GTDPYEDFQENW

SEQ ID NO: 20750 - protein, 13 aa, Severe acute respiratory syndrome coronavirus 2
  REGION 1..13: note = Table B: HLA-DPA1*01:03-B1*03:01L HLA-DPA1*02:01-B1*13:01L HLA-DRB1*07:01L HLA-DRB1*15:03L
WNTKHSSGVTREL

SEQ ID NO: 20751 - protein, 15 aa, Severe acute respiratory syndrome coronavirus 2
  REGION 1..15: note = Table B: HLA-DPA1*01:03-B1*03:01L
AYTRYVDNNFCGPDG

SEQ ID NO: 20752 - protein, 15 aa, Severe acute respiratory syndrome coronavirus 2
  REGION 1..15: note = Table B: HLA-DPA1*01:03-B1*03:01L HLA-DPA1*03:01-B1*04:02L HLA-DRB1*15:03L
GPDGYPLECIKDLLA

SEQ ID NO: 20753 - protein, 19 aa, Severe acute respiratory syndrome coronavirus 2
  REGION 1..19: note = Table B: HLA-DPA1*01:03-B1*03:01L HLA-DPA1*01:03-B1*04:02L
PDGYPLECIKDLLARAGKA

SEQ ID NO: 20754 - protein, 16 aa, Severe acute respiratory syndrome coronavirus 2
  REGION 1..16: note = Table B: HLA-DPA1*01:03-B1*03:01L HLA-DPA1*01:03-B1*04:02L HLA-DRB1*15:03L
EGATTCGYLPQNAVVK

SEQ ID NO: 20755 - protein, 18 aa, Severe acute respiratory syndrome coronavirus 2
  REGION 1..18: note = Table B: HLA-DPA1*01:03-B1*03:01L HLA-DPA1*01:03-B1*04:01L HLA-DPA1*02:01-B1*13:01L HLA-DQA1*05:05-B1*03:01L
EGSEGLNDNLLEILQKEK

SEQ ID NO: 20756 - protein, 14 aa, Severe acute respiratory syndrome coronavirus 2
  REGION 1..14: note = Table B: HLA-DPA1*01:03-B1*03:01L
AIILASFSASTSAF

SEQ ID NO: 20757 - protein, 13 aa, Severe acute respiratory syndrome coronavirus 2
  REGION 1..13: note = Table B: HLA-DPA1*01:03-B1*03:01L HLA-DPA1*03:01-B1*04:02L HLA-DPA1*01:03-B1*04:01L HLA-DPA1*01:02-B1*04:01L HLA-DRB1*15:03L
FSASTSAFVETVK

SEQ ID NO: 20758 - protein, 11 aa, Severe acute respiratory syndrome coronavirus 2
  REGION 1..11: note = Table B: HLA-DPA1*01:03-B1*03:01L HLA-DQA1*01:01-B1*05:01L HLA-DRB4*02:01NL HLA-DRB1*04:10L HLA-DRB1*09:01L
AFASEAARVVR

SEQ ID NO: 20759 - protein, 13 aa, Severe acute respiratory syndrome coronavirus 2
  REGION 1..13: note = Table B: HLA-DPA1*01:03-B1*03:01L
NSVRVLQKAAITI

SEQ ID NO: 20760 - protein, 13 aa, Severe acute respiratory syndrome coronavirus 2
  REGION 1..13: note = Table B: HLA-DPA1*01:03-B1*03:01L
LRLIDAMMFTSDL

SEQ ID NO: 20761 - protein, 13 aa, Severe acute respiratory syndrome coronavirus 2
  REGION 1..13: note = Table B: HLA-DPA1*01:03-B1*03:01L HLA-DRB1*14:17L
AYITGGVVQLTSQ

SEQ ID NO: 20762 - protein, 14 aa, Severe acute respiratory syndrome coronavirus 2
  REGION 1..14: note = Table B: HLA-DPA1*01:03-B1*03:01L HLA-DRB1*14:02L HLA-DRB1*09:01L HLA-DRB1*12:02L
TGGVVQLTSQWLTN

SEQ ID NO: 20763 - protein, 17 aa, Severe acute respiratory syndrome coronavirus 2
  REGION 1..17: note = Table B: HLA-DPA1*01:03-B1*03:01L
EKLKPVLDWLEEKFKEG

SEQ ID NO: 20764 - protein, 16 aa, Severe acute respiratory syndrome coronavirus 2
  REGION 1..16: note = Table B: HLA-DPA1*01:03-B1*03:01L
TFFKLVNKFLALCADS

SEQ ID NO: 20765 - protein, 13 aa, Severe acute respiratory syndrome coronavirus 2
  REGION 1..13: note = Table B: HLA-DPA1*01:03-B1*03:01L HLA-DPA1*02:01-B1*13:01L HLA-DRB1*15:03L
LVNKFLALCADSI

SEQ ID NO: 20766 - protein, 15 aa, Severe acute respiratory syndrome coronavirus 2
  REGION 1..15: note = Table B: HLA-DPA1*01:03-B1*03:01L HLA-DPA1*02:01-B1*13:01L
IIGGAKLKALNLGET

SEQ ID NO: 20767 - protein, 13 aa, Severe acute respiratory syndrome coronavirus 2
  REGION 1..13: note = Table B: HLA-DPA1*01:03-B1*03:01L HLA-DPA1*03:01-B1*04:02L HLA-DQA1*01-B1*05L HLA-DPA1*01:03-B1*04:02L
IIFLEGETLPTEV

SEQ ID NO: 20768 - protein, 14 aa, Severe acute respiratory syndrome coronavirus 2
  REGION 1..14: note = Table B: HLA-DPA1*01:03-B1*03:01L
EVLTEEVVLKTGDL

SEQ ID NO: 20769 - protein, 16 aa, Severe acute respiratory syndrome coronavirus 2
  REGION 1..16: note = Table B: HLA-DPA1*01:03-B1*03:01L HLA-DPA1*03:01-B1*105:01L
QPTSEAVEAPLVGTPV

SEQ ID NO: 20770 - protein, 16 aa, Severe acute respiratory syndrome coronavirus 2
  REGION 1..16: note = Table B: HLA-DPA1*01:03-B1*03:01L
MMVTNNTFTLKGGAPT

SEQ ID NO: 20771 - protein, 13 aa, Severe acute respiratory syndrome coronavirus 2
  REGION 1..13: note = Table B: HLA-DPA1*01:03-B1*03:01L HLA-DQA1*05:01-B1*02:01L HLA-DQA1*05:05-B1*03:116L HLA-DPA1*01:03-B1*04:02L HLA-DRB1*04:08L HLA-DRB1*15:03L
TFTLKGGAPTKVT

SEQ ID NO: 20772 - protein, 12 aa, Severe acute respiratory syndrome coronavirus 2
  REGION 1..12: note = Table B: HLA-DPA1*01:03-B1*03:01L
TFELDERIDKVL

SEQ ID NO: 20773 - protein, 14 aa, Severe acute respiratory syndrome coronavirus 2
  REGION 1..14: note = Table B: HLA-DPA1*01:03-B1*03:01L
VIKTLQPVSELLTP

SEQ ID NO: 20774 - protein, 10 aa, Severe acute respiratory syndrome coronavirus 2
  REGION 1..10: note = Table B: HLA-DPA1*01:03-B1*03:01L HLA-DRB1*03:01L HLA-DRB1*11:02L HLA-DQA1*01-B1*05L HLA-DQA1*05:05-B1*03:19M HLA-DQA1*05:01-B1*02:01L HLA-DPA1*01:03-B1*104:01L HLA-DRB1*16:01L
LDEWSMATYY

SEQ ID NO: 20775 - protein, 12 aa, Severe acute respiratory syndrome coronavirus 2
  REGION 1..12: note = Table B: HLA-DPA1*01:03-B1*03:01L HLA-DQA1*01:01-B1*05:01L HLA-DRB1*08:01L HLA-DRB1*12:01L HLA-DRB1*04:08L
EDDYQGKPLEFG

SEQ ID NO: 20776 - protein, 13 aa, Severe acute respiratory syndrome coronavirus 2
  REGION 1..13: note = Table B: HLA-DPA1*01:03-B1*03:01L
EDNQTTTIQTIVE

SEQ ID NO: 20777 - protein, 13 aa, Severe acute respiratory syndrome coronavirus 2
  REGION 1..13: note = Table B: HLA-DPA1*01:03-B1*03:01L HLA-DRB1*12:01L
LEMELTPVVQTIE

SEQ ID NO: 20778 - protein, 14 aa, Severe acute respiratory syndrome coronavirus 2
  REGION 1..14: note = Table B: HLA-DPA1*01:03-B1*03:01L HLA-DPA1*03:01-B1*04:02L HLA-DPA1*02:01-B1*13:01L
YLKLTDNVYIKNAD

SEQ ID NO: 20779 - protein, 18 aa, Severe acute respiratory syndrome coronavirus 2
  REGION 1..18: note = Table B: HLA-DPA1*01:03-B1*03:01L
IKNADIVEEAKKVKPTVV

SEQ ID NO: 20780 - protein, 14 aa, Severe acute respiratory syndrome coronavirus 2
  REGION 1..14: note = Table B: HLA-DPA1*01:03-B1*03:01L HLA-DRB1*14:02L
NVYLKHGGGVAGAL

SEQ ID NO: 20781 - protein, 12 aa, Severe acute respiratory syndrome coronavirus 2
  REGION 1..12: note = Table B: HLA-DPA1*01:03-B1*03:01L HLA-DPA1*03:01-B1*04:02L
LYDKLVSSFLEM

SEQ ID NO: 20782 - protein, 16 aa, Severe acute respiratory syndrome coronavirus 2
  REGION 1..16: note = Table B: HLA-DPA1*01:03-B1*03:01L
DKKIKACVEEVTTTLE

SEQ ID NO: 20783 - protein, 17 aa, Severe acute respiratory syndrome coronavirus 2
  REGION 1..17: note = Table B: HLA-DPA1*01:03-B1*03:01L
GTTEMLAKALRKVPTDN

SEQ ID NO: 20784 - protein, 12 aa, Severe acute respiratory syndrome coronavirus 2
  REGION 1..12: note = Table B: HLA-DPA1*01:03-B1*03:01L HLA-DPA1*03:01-B1*04:02L HLA-DRB1*15:03L
NEKQEILGTVSW

SEQ ID NO: 20785 - protein, 12 aa, Severe acute respiratory syndrome coronavirus 2
  REGION 1..12: note = Table B: HLA-DPA1*01:03-B1*03:01L HLA-DQA1*01-B1*05L HLA-DRB1*04:10L HLA-DPA1*02:01-B1*13:01L
QEILGTVSWNLR

SEQ ID NO: 20786 - protein, 12 aa, Severe acute respiratory syndrome coronavirus 2
  REGION 1..12: note = Table B: HLA-DPA1*01:03-B1*03:01L HLA-DQA1*01-B1*05L
EILGTVSWNLRE

SEQ ID NO: 20787 - protein, 18 aa, Severe acute respiratory syndrome coronavirus 2
  REGION 1..18: note = Table B: HLA-DPA1*01:03-B1*03:01L HLA-DRB1*14:02L HLA-DQA1*05:01-B1*02:01L
NLREMLAHAEETRKLMPV

SEQ ID NO: 20788 - protein, 13 aa, Severe acute respiratory syndrome coronavirus 2
  REGION 1..13: note = Table B: HLA-DPA1*01:03-B1*03:01L
SKTTVASLINTLN

SEQ ID NO: 20789 - protein, 15 aa, Severe acute respiratory syndrome coronavirus 2
  REGION 1..15: note = Table B: HLA-DPA1*01:03-B1*03:01L HLA-DRB1*10:01L
KTTVASLINTLNDLN

SEQ ID NO: 20790 - protein, 14 aa, Severe acute respiratory syndrome coronavirus 2
  REGION 1..14: note = Table B: HLA-DPA1*01:03-B1*03:01L HLA-DQA1*05:05-B1*03:01L
LINTLNDLNETLVT

SEQ ID NO: 20791 - protein, 14 aa, Severe acute respiratory syndrome coronavirus 2
  REGION 1..14: note = Table B: HLA-DPA1*01:03-B1*03:01L HLA-DRB1*12:01L
RSLKVPATVSVSSP

SEQ ID NO: 20792 - protein, 10 aa, Severe acute respiratory syndrome coronavirus 2
  REGION 1..10: note = Table B: HLA-DPA1*01:03-B1*03:01L HLA-DQA1*05:05-B1*03:19L HLA-DQA1*05:01-B1*02:01L HLA-DPA1*01:03-B1*104:01L HLA-DRB1*16:01L
LAGSYKDWSY

SEQ ID NO: 20793 - protein, 13 aa, Severe acute respiratory syndrome coronavirus 2
  REGION 1..13: note = Table B: HLA-DPA1*01:03-B1*03:01L HLA-DRB1*08:01L HLA-DPA1*02:01-B1*13:01L HLA-DQA1*01:03-B1*06:01L HLA-DRB1*04:08L
SYKDWSYSGQSTQ

SEQ ID NO: 20794 - protein, 13 aa, Severe acute respiratory syndrome coronavirus 2
  REGION 1..13: note = Table B: HLA-DPA1*01:03-B1*03:01L HLA-DRB1*12:01L
WSYSGQSTQLGIE

SEQ ID NO: 20795 - protein, 18 aa, Severe acute respiratory syndrome coronavirus 2
  REGION 1..18: note = Table B: HLA-DPA1*01:03-B1*03:01L HLA-DPA1*01:03-B1*104:01L
SGQSTQLGIEFLKRGDKS

SEQ ID NO: 20796 - protein, 18 aa, Severe acute respiratory syndrome coronavirus 2
  REGION 1..18: note = Table B: HLA-DPA1*01:03-B1*03:01L
TFDNLKTLLSLREVRTIK

SEQ ID NO: 20797 - protein, 16 aa, Severe acute respiratory syndrome coronavirus 2
  REGION 1..16: note = Table B: HLA-DPA1*01:03-B1*03:01L HLA-DRB1*11:03L HLA-DRB1*14:02L HLA-DPA1*01:03-B1*104:01L HLA-DPA1*01:02-B1*04:01L HLA-DRB1*08:03L
DGADVTKIKPHNSHEG

SEQ ID NO: 20798 - protein, 18 aa, Severe acute respiratory syndrome coronavirus 2
  REGION 1..18: note = Table B: HLA-DPA1*01:03-B1*03:01L
GADVTKIKPHNSHEGKTF

SEQ ID NO: 20799 - protein, 10 aa, Severe acute respiratory syndrome coronavirus 2
  REGION 1..10: note = Table B: HLA-DPA1*01:03-B1*03:01L HLA-DQA1*01-B1*05L HLA-DQA1*05:05-B1*03:19L HLA-DQA1*05:01-B1*02:01L HLA-DRB1*10:01L HLA-DRB1*16:01L
NDDTLRVEAF

SEQ ID NO: 20800 - protein, 12 aa, Severe acute respiratory syndrome coronavirus 2
  REGION 1..12: note = Table B: HLA-DPA1*01:03-B1*03:01L HLA-DRB1*10:01L HLA-DRB1*04:08L
YYHTTDPSFLGR

SEQ ID NO: 20801 - protein, 18 aa, Severe acute respiratory syndrome coronavirus 2
  REGION 1..18: note = Table B: HLA-DPA1*01:03-B1*03:01L HLA-DRB1*11:02L HLA-DRB1*14:02L
LGRYMSALNHTKKWKYPQ

SEQ ID NO: 20802 - protein, 14 aa, Severe acute respiratory syndrome coronavirus 2
  REGION 1..14: note = Table B: HLA-DPA1*01:03-B1*03:01L HLA-DPA1*01:03-B1*104:01L HLA-DRB1*15:03L
HTKKWKYPQVNGLT

SEQ ID NO: 20803 - protein, 12 aa, Severe acute respiratory syndrome coronavirus 2
  REGION 1..12: note = Table B: HLA-DPA1*01:03-B1*03:01L HLA-DQA1*05:05-B1*03:19L HLA-DPA1*01:03-B1*04:01L HLA-DRB1*12:01L HLA-DRB1*15:03L
NGLTSIKWADNN

SEQ ID NO: 20804 - protein, 16 aa, Severe acute respiratory syndrome coronavirus 2
  REGION 1..16: note = Table B: HLA-DPA1*01:03-B1*03:01L HLA-DRB1*14:02L
SYLFQHANLDSCKRVL

SEQ ID NO: 20805 - protein, 16 aa, Severe acute respiratory syndrome coronavirus 2
  REGION 1..16: note = Table B: HLA-DPA1*01:03-B1*03:01L
EQFKKGVQIPCTCGKQ

SEQ ID NO: 20806 - protein, 14 aa, Severe acute respiratory syndrome coronavirus 2
  REGION 1..14: note = Table B: HLA-DPA1*01:03-B1*03:01L HLA-DPA1*02:01-B1*13:01L HLA-DPA1*03:01-B1*105:01L HLA-DQA1*05:05-B1*03:01L HLA-DQA1*01:03-B1*06:01L
YELKHGTFTCASEY

SEQ ID NO: 20807 - protein, 14 aa, Severe acute respiratory syndrome coronavirus 2
  REGION 1..14: note = Table B: HLA-DPA1*01:03-B1*03:01L HLA-DPA1*02:01-B1*13:01L HLA-DQA1*05:05-B1*03:01L HLA-DQA1*01:03-B1*06:01L HLA-DQA1*02:01-B1*03:03L
ELKHGTFTCASEYT

SEQ ID NO: 20808 - protein, 15 aa, Severe acute respiratory syndrome coronavirus 2
  REGION 1..15: note = Table B: HLA-DPA1*01:03-B1*03:01L HLA-DRB1*03:01L HLA-DPA1*01:03-B1*04:02L
ETLYCIDGALLTKSS

SEQ ID NO: 20809 - protein, 16 aa, Severe acute respiratory syndrome coronavirus 2
  REGION 1..16: note = Table B: HLA-DPA1*01:03-B1*03:01L HLA-DRB1*04:08L
VTYKLDGVVCTEIDPK

SEQ ID NO: 20810 - protein, 17 aa, Severe acute respiratory syndrome coronavirus 2
  REGION 1..17: note = Table B: HLA-DPA1*01:03-B1*03:01L HLA-DPA1*03:01-B1*105:01L
DPKLDNYYKKDNSYFTE

SEQ ID NO: 20811 - protein, 15 aa, Severe acute respiratory syndrome coronavirus 2
  REGION 1..15: note = Table B: HLA-DPA1*01:03-B1*03:01L HLA-DPA1*03:01-B1*04:02L HLA-DRB1*03:01L HLA-DRB1*11:04L HLA-DRB1*14:02L HLA-DRB1*11:01L HLA-DQA1*01-B1*05L HLA-DQA1*05:01-B1*02:01L HLA-DPA1*01:03-B1*04:02L HLA-DPA1*01:02-B1*04:01L
DNYYKKDNSYFTEQP

SEQ ID NO: 20812 - protein, 10 aa, Severe acute respiratory syndrome coronavirus 2
  REGION 1..10: note = Table B: HLA-DPA1*01:03-B1*03:01L HLA-DQA1*05:05-B1*03:19L HLA-DQA1*05:01-B1*02:01L HLA-DPA1*01:03-B1*104:01L HLA-DRB1*16:01L
PIDLVPNQPY

SEQ ID NO: 20813 - protein, 16 aa, Severe acute respiratory syndrome coronavirus 2
  REGION 1..16: note = Table B: HLA-DPA1*01:03-B1*03:01L HLA-DPA1*03:01-B1*04:02L HLA-DRB1*14:02L HLA-DQA1*05:01-B1*02:01L HLA-DPA1*01:03-B1*04:02L HLA-DQA1*01:03-B1*06:01L
NFKFVCDNIKFADDLN

SEQ ID NO: 20814 - protein, 16 aa, Severe acute respiratory syndrome coronavirus 2
  REGION 1..16: note = Table B: HLA-DPA1*01:03-B1*03:01L HLA-DPA1*01:03-B1*104:01L
DLNQLTGYKKPASREL

SEQ ID NO: 20815 - protein, 18 aa, Severe acute respiratory syndrome coronavirus 2
  REGION 1..18: note = Table B: HLA-DPA1*01:03-B1*03:01L HLA-DPA1*03:01-B1*105:01L HLA-DPA1*01:03-B1*104:01L
GAKLLHKPIVWHVNNATN

SEQ ID NO: 20816 - protein, 13 aa, Severe acute respiratory syndrome coronavirus 2
  REGION 1..13: note = Table B: HLA-DPA1*01:03-B1*03:01L HLA-DQA1*05:01-B1*02:01L HLA-DPA1*03:01-B1*105:01L HLA-DRB1*15:03L
NATNKATYKPNTW

SEQ ID NO: 20817 - protein, 16 aa, Severe acute respiratory syndrome coronavirus 2
  REGION 1..16: note = Table B: HLA-DPA1*01:03-B1*03:01L
NPTIQKDVLECNVKTT

SEQ ID NO: 20818 - protein, 17 aa, Severe acute respiratory syndrome coronavirus 2
  REGION 1..17: note = Table B: HLA-DPA1*01:03-B1*03:01L HLA-DPA1*02:01-B1*13:01L
IQKDVLECNVKTTEVVG

SEQ ID NO: 20819 - protein, 18 aa, Severe acute respiratory syndrome coronavirus 2
  REGION 1..18: note = Table B: HLA-DPA1*01:03-B1*03:01L HLA-DPA1*01:03-B1*104:01L
KPNELSRVLGLKTLATHG

SEQ ID NO: 20820 - protein, 13 aa, Severe acute respiratory syndrome coronavirus 2
  REGION 1..13: note = Table B: HLA-DPA1*01:03-B1*03:01L HLA-DRB1*04:08L
LKTLATHGLAAVN

SEQ ID NO: 20821 - protein, 15 aa, Severe acute respiratory syndrome coronavirus 2
  REGION 1..15: note = Table B: HLA-DPA1*01:03-B1*03:01L HLA-DPA1*02:01-B1*13:01L
IVTRCLNRVCTNYMP

SEQ ID NO: 20822 - protein, 12 aa, Severe acute respiratory syndrome coronavirus 2
  REGION 1..12: note = Table B: HLA-DPA1*01:03-B1*03:01L HLA-DPA1*02:01-B1*13:01L
LNRVCTNYMPYF

SEQ ID NO: 20823 - protein, 13 aa, Severe acute respiratory syndrome coronavirus 2
  REGION 1..13: note = Table B: HLA-DPA1*01:03-B1*03:01L
IKASMPTTIAKNT

SEQ ID NO: 20824 - protein, 16 aa, Severe acute respiratory syndrome coronavirus 2
  REGION 1..16: note = Table B: HLA-DPA1*01:03-B1*03:01L HLA-DPA1*01:03-B1*104:01L
NTVKSVGKFCLEASFN

SEQ ID NO: 20825 - protein, 13 aa, Severe acute respiratory syndrome coronavirus 2
  REGION 1..13: note = Table B: HLA-DPA1*01:03-B1*03:01L HLA-DPA1*03:01-B1*04:02L HLA-DPA1*02:01-B1*13:01L HLA-DPA1*03:01-B1*105:01L HLA-DPA1*01:03-B1*104:01L
SVGKFCLEASFNY

SEQ ID NO: 20826 - protein, 11 aa, Severe acute respiratory syndrome coronavirus 2
  REGION 1..11: note = Table B: HLA-DPA1*01:03-B1*03:01L
LAYILFTRFFY

SEQ ID NO: 20827 - protein, 12 aa, Severe acute respiratory syndrome coronavirus 2
  REGION 1..12: note = Table B: HLA-DPA1*01:03-B1*03:01L HLA-DPA1*02:01-B1*13:01L
FFSYFAVHFISN

SEQ ID NO: 20828 - protein, 12 aa, Severe acute respiratory syndrome coronavirus 2
  REGION 1..12: note = Table B: HLA-DPA1*01:03-B1*03:01L HLA-DPA1*01:03-B1*04:02L
AVHFISNSWLMW

SEQ ID NO: 20829 - protein, 13 aa, Severe acute respiratory syndrome coronavirus 2
  REGION 1..13: note = Table B: HLA-DPA1*01:03-B1*03:01L
FYYVWKSYVHVVD

SEQ ID NO: 20830 - protein, 16 aa, Severe acute respiratory syndrome coronavirus 2
  REGION 1..16: note = Table B: HLA-DPA1*01:03-B1*03:01L
VWKSYVHVVDGCNSST

SEQ ID NO: 20831 - protein, 18 aa, Severe acute respiratory syndrome coronavirus 2
  REGION 1..18: note = Table B: HLA-DPA1*01:03-B1*03:01L HLA-DPA1*03:01-B1*04:02L HLA-DQA1*05:05-B1*03:116L HLA-DPA1*01:03-B1*02:01L HLA-DPA1*01:03-B1*104:01L HLA-DPA1*01:02-B1*04:01L
VARDLSLQFKRPINPTDQ

SEQ ID NO: 20832 - protein, 14 aa, Severe acute respiratory syndrome coronavirus 2
  REGION 1..14: note = Table B: HLA-DPA1*01:03-B1*03:01L HLA-DPA1*02:01-B1*13:01L
ANNTKGSLPINVIV

SEQ ID NO: 20833 - protein, 14 aa, Severe acute respiratory syndrome coronavirus 2
  REGION 1..14: note = Table B: HLA-DPA1*01:03-B1*03:01L
NTKGSLPINVIVFD

SEQ ID NO: 20834 - protein, 14 aa, Severe acute respiratory syndrome coronavirus 2
  REGION 1..14: note = Table B: HLA-DPA1*01:03-B1*03:01L
ELAKNVSLDNVLST

SEQ ID NO: 20835 - protein, 16 aa, Severe acute respiratory syndrome coronavirus 2
  REGION 1..16: note = Table B: HLA-DPA1*01:03-B1*03:01L HLA-DPA1*03:01-B1*04:02L HLA-DRB1*11:02L HLA-DRB1*14:02L HLA-DQA1*05:05-B1*03:19L HLA-DPA1*01:03-B1*04:02L HLA-DPA1*01:03-B1*104:01L HLA-DRB1*08:02L
KDVVECLKLSHQSDIE

SEQ ID NO: 20836 - protein, 14 aa, Severe acute respiratory syndrome coronavirus 2
  REGION 1..14: note = Table B: HLA-DPA1*01:03-B1*03:01L HLA-DPA1*03:01-B1*04:02L HLA-DRB1*14:02L HLA-DQA1*05:05-B1*03:19L HLA-DPA1*01:03-B1*04:02L HLA-DPA1*01:03-B1*02:01L
MLTYNKVENMTPRD

SEQ ID NO: 20837 - protein, 17 aa, Severe acute respiratory syndrome coronavirus 2
  REGION 1..17: note = Table B: HLA-DPA1*01:03-B1*03:01L
TPRDLGACIDCSARHIN

SEQ ID NO: 20838 - protein, 15 aa, Severe acute respiratory syndrome coronavirus 2
  REGION 1..15: note = Table B: HLA-DPA1*01:03-B1*03:01L
ARHINAQVAKSHNIA

SEQ ID NO: 20839 - protein, 15 aa, Severe acute respiratory syndrome coronavirus 2
  REGION 1..15: note = Table B: HLA-DPA1*01:03-B1*03:01L HLA-DQA1*05:05-B1*03:19L
NVKDFMSLSEQLRKQ

SEQ ID NO: 20840 - protein, 12 aa, Severe acute respiratory syndrome coronavirus 2
  REGION 1..12: note = Table B: HLA-DPA1*01:03-B1*03:01L HLA-DPA1*03:01-B1*04:02L HLA-DQA1*05:01-B1*02:01L HLA-DPA1*01:03-B1*04:02L
IALKGGKIVNNW

SEQ ID NO: 20841 - protein, 15 aa, Severe acute respiratory syndrome coronavirus 2
  REGION 1..15: note = Table B: HLA-DPA1*01:03-B1*03:01L HLA-DRB1*03:01L HLA-DRB1*11:02L
GKIVNNWLKQLIKVT

SEQ ID NO: 20842 - protein, 15 aa, Severe acute respiratory syndrome coronavirus 2
  REGION 1..15: note = Table B: HLA-DPA1*01:03-B1*03:01L HLA-DRB1*03:01L HLA-DRB1*13:01L HLA-DQA1*03:01-B1*03:02L HLA-DRB1*14:54L HLA-DPA1*01:03-B1*104:01L HLA-DRB1*07:01L
GDFLHFLPRVFSAVG

SEQ ID NO: 20843 - protein, 15 aa, Severe acute respiratory syndrome coronavirus 2
  REGION 1..15: note = Table B: HLA-DPA1*01:03-B1*03:01L
DFLHFLPRVFSAVGN

SEQ ID NO: 20844 - protein, 13 aa, Severe acute respiratory syndrome coronavirus 2
  REGION 1..13: note = Table B: HLA-DPA1*01:03-B1*03:01L HLA-DRB1*12:01L HLA-DRB1*15:03L
TNVLEGSVAYESL

SEQ ID NO: 20845 - protein, 13 aa, Severe acute respiratory syndrome coronavirus 2
  REGION 1..13: note = Table B: HLA-DPA1*01:03-B1*03:01L HLA-DQA1*05:01-B1*02:01L
ESLRPDTRYVLMD

SEQ ID NO: 20846 - protein, 13 aa, Severe acute respiratory syndrome coronavirus 2
  REGION 1..13: note = Table B: HLA-DPA1*01:03-B1*03:01L
FPNTYLEGSVRVV

SEQ ID NO: 20847 - protein, 16 aa, Severe acute respiratory syndrome coronavirus 2
  REGION 1..16: note = Table B: HLA-DPA1*01:03-B1*03:01L
ERSEAGVCVSTSGRWV

SEQ ID NO: 20848 - protein, 12 aa, Severe acute respiratory syndrome coronavirus 2
  REGION 1..12: note = Table B: HLA-DPA1*01:03-B1*03:01L
GVDAVNLLTNMF

SEQ ID NO: 20849 - protein, 16 aa, Severe acute respiratory syndrome coronavirus 2
  REGION 1..16: note = Table B: HLA-DPA1*01:03-B1*03:01L HLA-DRB1*14:01L HLA-DQA1*05:05-B1*03:19L HLA-DPA1*03:01-B1*105:01L HLA-DRB1*15:03L
QPIGALDISASIVAGG

SEQ ID NO: 20850 - protein, 16 aa, Severe acute respiratory syndrome coronavirus 2
  REGION 1..16: note = Table B: HLA-DPA1*01:03-B1*03:01L HLA-DPA1*01:03-B1*104:01L
RFRRAFGEYSHVVAFN

SEQ ID NO: 20851 - protein, 16 aa, Severe acute respiratory syndrome coronavirus 2
  REGION 1..16: note = Table B: HLA-DPA1*01:03-B1*03:01L HLA-DQA1*05:05-B1*03:19L HLA-DRB1*04:08L
SFTVLCLTPVYSFLPG

SEQ ID NO: 20852 - protein, 15 aa, Severe acute respiratory syndrome coronavirus 2
  REGION 1..15: note = Table B: HLA-DPA1*01:03-B1*03:01L
AHIQWMVMFTPLVPF

SEQ ID NO: 20853 - protein, 14 aa, Severe acute respiratory syndrome coronavirus 2
  REGION 1..14: note = Table B: HLA-DPA1*01:03-B1*03:01L HLA-DPA1*01:03-B1*04:02L HLA-DPA1*03:01-B1*105:01L HLA-DPA1*01:03-B1*104:01L
ISTKHFYWFFSNYL

SEQ ID NO: 20854 - protein, 15 aa, Severe acute respiratory syndrome coronavirus 2
  REGION 1..15: note = Table B: HLA-DPA1*01:03-B1*03:01L
AKALNDFSNSGSDVL

SEQ ID NO: 20855 - protein, 15 aa, Severe acute respiratory syndrome coronavirus 2
  REGION 1..15: note = Table B: HLA-DPA1*01:03-B1*03:01L HLA-DPA1*01:03-B1*104:01L HLA-DRB1*07:01L
SGFRKMAFPSGKVEG

SEQ ID NO: 20856 - protein, 13 aa, Severe acute respiratory syndrome coronavirus 2
  REGION 1..13: note = Table B: HLA-DPA1*01:03-B1*03:01L HLA-DQA1*05:05-B1*03:19L HLA-DPA1*01:03-B1*04:01L HLA-DPA1*01:03-B1*04:02L HLA-DQA1*05:05-B1*03:01L
SEDMLNPNYEDLL

SEQ ID NO: 20857 - protein, 14 aa, Severe acute respiratory syndrome coronavirus 2
  REGION 1..14: note = Table B: HLA-DPA1*01:03-B1*03:01L HLA-DPA1*01:03-B1*04:02L
EDMLNPNYEDLLIR

SEQ ID NO: 20858 - protein, 15 aa, Severe acute respiratory syndrome coronavirus 2
  REGION 1..15: note = Table B: HLA-DPA1*01:03-B1*03:01L HLA-DRB1*03:01L HLA-DRB1*11:02L HLA-DRB1*11:03L HLA-DRB1*14:02L HLA-DRB1*11:01L
EDLLIRKSNHNFLVQ

SEQ ID NO: 20859 - protein, 15 aa, Severe acute respiratory syndrome coronavirus 2
  REGION 1..15: note = Table B: HLA-DPA1*01:03-B1*03:01L
LLIRKSNHNFLVQAG

SEQ ID NO: 20860 - protein, 12 aa, Severe acute respiratory syndrome coronavirus 2
  REGION 1..12: note = Table B: HLA-DPA1*01:03-B1*03:01L
NFLVQAGNVQLR

SEQ ID NO: 20861 - protein, 14 aa, Severe acute respiratory syndrome coronavirus 2
  REGION 1..14: note = Table B: HLA-DPA1*01:03-B1*03:01L
FLVQAGNVQLRVIG

SEQ ID NO: 20862 - protein, 13 aa, Severe acute respiratory syndrome coronavirus 2
  REGION 1..13: note = Table B: HLA-DPA1*01:03-B1*03:01L HLA-DRB1*14:02L HLA-DRB1*04:08L
LKLKVDTANPKTP

SEQ ID NO: 20863 - protein, 11 aa, Severe acute respiratory syndrome coronavirus 2
  REGION 1..11: note = Table B: HLA-DPA1*01:03-B1*03:01L HLA-DQA1*01-B1*05L HLA-DRB1*12:01L HLA-DQA1*05:05-B1*03:01L
RIQPGQTFSVL

SEQ ID NO: 20864 - protein, 14 aa, Severe acute respiratory syndrome coronavirus 2
  REGION 1..14: note = Table B: HLA-DPA1*01:03-B1*03:01L HLA-DPA1*02:01-B1*13:01L
QPGQTFSVLACYNG

SEQ ID NO: 20865 - protein, 14 aa, Severe acute respiratory syndrome coronavirus 2
  REGION 1..14: note = Table B: HLA-DPA1*01:03-B1*03:01L HLA-DPA1*03:01-B1*04:02L HLA-DRB1*14:01L HLA-DPA1*02:01-B1*13:01L HLA-DRB1*15:03L
SPSGVYQCAMRPNF

SEQ ID NO: 20866 - protein, 14 aa, Severe acute respiratory syndrome coronavirus 2
  REGION 1..14: note = Table B: HLA-DPA1*01:03-B1*03:01L
LVAMKYNYEPLTQD

SEQ ID NO: 20867 - protein, 14 aa, Severe acute respiratory syndrome coronavirus 2
  REGION 1..14: note = Table B: HLA-DPA1*01:03-B1*03:01L HLA-DPA1*03:01-B1*105:01L
ILGPLSAQTGIAVL

SEQ ID NO: 20868 - protein, 16 aa, Severe acute respiratory syndrome coronavirus 2
  REGION 1..16: note = Table B: HLA-DPA1*01:03-B1*03:01L HLA-DRB1*03:01L HLA-DQA1*05:01-B1*02:01L HLA-DRB1*16:01L HLA-DRB1*04:08L
LKELLQNGMNGRTILG

SEQ ID NO: 20869 - protein, 16 aa, Severe acute respiratory syndrome coronavirus 2
  REGION 1..16: note = Table B: HLA-DPA1*01:03-B1*03:01L HLA-DPA1*01:03-B1*04:02L
MSAFAMMFVKHKHAFL

SEQ ID NO: 20870 - protein, 14 aa, Severe acute respiratory syndrome coronavirus 2
  REGION 1..14: note = Table B: HLA-DPA1*01:03-B1*03:01L HLA-DQA1*05:05-B1*03:19L HLA-DQA1*05:05-B1*03:01L HLA-DQA1*02:01-B1*03:03L
FKLKDCVMYASAVV

SEQ ID NO: 20871 - protein, 13 aa, Severe acute respiratory syndrome coronavirus 2
  REGION 1..13: note = Table B: HLA-DPA1*01:03-B1*03:01L
DGARRVWTLMNVL

SEQ ID NO: 20872 - protein, 12 aa, Severe acute respiratory syndrome coronavirus 2
  REGION 1..12: note = Table B: HLA-DPA1*01:03-B1*03:01L HLA-DPA1*03:01-B1*04:02L HLA-DRB1*12:01L HLA-DPA1*03:01-B1*105:01L HLA-DRB1*15:03L
RYFRLTLGVYDY

SEQ ID NO: 20873 - protein, 15 aa, Severe acute respiratory syndrome coronavirus 2
  REGION 1..15: note = Table B: HLA-DPA1*01:03-B1*03:01L HLA-DPA1*01:03-B1*04:02L HLA-DPA1*02:01-B1*13:01L
QEFRYMNSQGLLPPK

SEQ ID NO: 20874 - protein, 15 aa, Severe acute respiratory syndrome coronavirus 2
  REGION 1..15: note = Table B: HLA-DPA1*01:03-B1*03:01L HLA-DPA1*02:01-B1*13:01L HLA-DPA1*01:03-B1*104:01L
YMNSQGLLPPKNSID

SEQ ID NO: 20875 - protein, 13 aa, Severe acute respiratory syndrome coronavirus 2
  REGION 1..13: note = Table B: HLA-DPA1*01:03-B1*03:01L HLA-DRB1*11:04L HLA-DQA1*05:05-B1*03:19L HLA-DQA1*05:05-B1*03:01L HLA-DRB1*10:01L
LSVLQQLRVESSS

SEQ ID NO: 20876 - protein, 12 aa, Severe acute respiratory syndrome coronavirus 2
  REGION 1..12: note = Table B: HLA-DPA1*01:03-B1*03:01L HLA-DPA1*03:01-B1*04:02L HLA-DPA1*01:03-B1*04:01L
SEFSSLPSYAAF

SEQ ID NO: 20877 - protein, 13 aa, Severe acute respiratory syndrome coronavirus 2
  REGION 1..13: note = Table B: HLA-DPA1*01:03-B1*03:01L
KLKKSLNVAKSEF

SEQ ID NO: 20878 - protein, 15 aa, Severe acute respiratory syndrome coronavirus 2
  REGION 1..15: note = Table B: HLA-DPA1*01:03-B1*03:01L
AMQRKLEKMADQAMT

SEQ ID NO: 20879 - protein, 14 aa, Severe acute respiratory syndrome coronavirus 2
  REGION 1..14: note = Table B: HLA-DPA1*01:03-B1*03:01L
EDKRAKVTSAMQTM

SEQ ID NO: 20880 - protein, 14 aa, Severe acute respiratory syndrome coronavirus 2
  REGION 1..14: note = Table B: HLA-DPA1*01:03-B1*03:01L
DKRAKVTSAMQTML

SEQ ID NO: 20881 - protein, 17 aa, Severe acute respiratory syndrome coronavirus 2
  REGION 1..17: note = Table B: HLA-DPA1*01:03-B1*03:01L
VTSAMQTMLFTMLRKLD

SEQ ID NO: 20882 - protein, 16 aa, Severe acute respiratory syndrome coronavirus 2
  REGION 1..16: note = Table B: HLA-DPA1*01:03-B1*03:01L HLA-DQA1*01-B1*05L
SAMQTMLFTMLRKLDN

SEQ ID NO: 20883 - protein, 16 aa, Severe acute respiratory syndrome coronavirus 2
  REGION 1..16: note = Table B: HLA-DPA1*01:03-B1*03:01L
MQTMLFTMLRKLDNDA

SEQ ID NO: 20884 - protein, 14 aa, Severe acute respiratory syndrome coronavirus 2
  REGION 1..14: note = Table B: HLA-DPA1*01:03-B1*03:01L HLA-DPA1*02:01-B1*13:01L
NNARDGCVPLNIIP

SEQ ID NO: 20885 - protein, 14 aa, Severe acute respiratory syndrome coronavirus 2
  REGION 1..14: note = Table B: HLA-DPA1*01:03-B1*03:01L HLA-DPA1*02:01-B1*13:01L HLA-DPA1*01:03-B1*104:01L HLA-DQA1*01:03-B1*06:01L
NARDGCVPLNIIPL

SEQ ID NO: 20886 - protein, 13 aa, Severe acute respiratory syndrome coronavirus 2
  REGION 1..13: note = Table B: HLA-DPA1*01:03-B1*03:01L HLA-DRB1*12:01L HLA-DRB1*15:03L
TTAAKLMVVIPDY

SEQ ID NO: 20887 - protein, 15 aa, Severe acute respiratory syndrome coronavirus 2
  REGION 1..15: note = Table B: HLA-DPA1*01:03-B1*03:01L
ASALWEIQQVVDADS

SEQ ID NO: 20888 - protein, 12 aa, Severe acute respiratory syndrome coronavirus 2
  REGION 1..12: note = Table B: HLA-DPA1*01:03-B1*03:01L HLA-DQA1*05:05-B1*03:19L HLA-DRB1*09:01L HLA-DRB1*07:01L HLA-DRB1*04:08L
KIVQLSEISMDN

SEQ ID NO: 20889 - protein, 13 aa, Severe acute respiratory syndrome coronavirus 2
  REGION 1..13: note = Table B: HLA-DPA1*01:03-B1*03:01L HLA-DQA1*05:01-B1*02:01L HLA-DPA1*03:01-B1*105:01L
DNSPNLAWPLIVT

SEQ ID NO: 20890 - protein, 14 aa, Severe acute respiratory syndrome coronavirus 2
  REGION 1..14: note = Table B: HLA-DPA1*01:03-B1*03:01L
AWPLIVTALRANSA

SEQ ID NO: 20891 - protein, 13 aa, Severe acute respiratory syndrome coronavirus 2
  REGION 1..13: note = Table B: HLA-DPA1*01:03-B1*03:01L HLA-DPA1*03:01-B1*04:02L HLA-DRB1*11:04L HLA-DRB1*11:01L HLA-DQA1*05:05-B1*03:19L HLA-DQA1*05:01-B1*02:01L HLA-DRB1*09:01L HLA-DPA1*03:01-B1*105:01L HLA-DPA1*01:02-B1*04:01L
VTALRANSAVKLQ

SEQ ID NO: 20892 - protein, 12 aa, Severe acute respiratory syndrome coronavirus 2
  REGION 1..12: note = Table B: HLA-DPA1*01:03-B1*03:01L HLA-DRB1*12:02L
AVKLQNNELSPV

SEQ ID NO: 20893 - protein, 10 aa, Severe acute respiratory syndrome coronavirus 2
  REGION 1..10: note = Table B: HLA-DPA1*01:03-B1*03:01L HLA-DRB1*11:02L HLA-DQA1*05:05-B1*03:19M HLA-DQA1*05:01-B1*02:01L HLA-DPA1*01:03-B1*104:01L HLA-DRB1*16:01L
CTDDNALAYY

SEQ ID NO: 20894 - protein, 15 aa, Severe acute respiratory syndrome coronavirus 2
  REGION 1..15: note = Table B: HLA-DPA1*01:03-B1*03:01L HLA-DRB4*01:01L HLA-DRB3*01:01L HLA-DPA1*01:03-B1*02:01L HLA-DPA1*01:03-B1*104:01L HLA-DQA1*05:05-B1*03:01L
GRFVLALLSDLQDLK

SEQ ID NO: 20895 - protein, 10 aa, Severe acute respiratory syndrome coronavirus 2
  REGION 1..10: note = Table B: HLA-DPA1*01:03-B1*03:01L HLA-DQA1*01-B1*05L HLA-DQA1*05:05-B1*03:19L HLA-DQA1*05:01-B1*02:01L HLA-DPA1*01:03-B1*104:01L HLA-DRB1*16:01L
YTELEPPCRF

SEQ ID NO: 20896 - protein, 14 aa, Severe acute respiratory syndrome coronavirus 2
  REGION 1..14: note = Table B: HLA-DPA1*01:03-B1*03:01L
LAATVRLQAGNATE

SEQ ID NO: 20897 - protein, 15 aa, Severe acute respiratory syndrome coronavirus 2
  REGION 1..15: note = Table B: HLA-DPA1*01:03-B1*03:01L
LQAGNATEVPANSTV

SEQ ID NO: 20898 - protein, 14 aa, Severe acute respiratory syndrome coronavirus 2
  REGION 1..14: note = Table B: HLA-DPA1*01:03-B1*03:01L HLA-DRB1*12:01L
TVLSFCAFAVDAAK

SEQ ID NO: 20899 - protein, 14 aa, Severe acute respiratory syndrome coronavirus 2
  REGION 1..14: note = Table B: HLA-DPA1*01:03-B1*03:01L HLA-DRB1*08:01L HLA-DRB1*11:01L HLA-DPA1*01:03-B1*04:02L HLA-DRB1*12:01L
THTGTGQAITVTPE

SEQ ID NO: 20900 - protein, 14 aa, Severe acute respiratory syndrome coronavirus 2
  REGION 1..14: note = Table B: HLA-DPA1*01:03-B1*03:01L
TVTPEANMDQESFG

SEQ ID NO: 20901 - protein, 14 aa, Severe acute respiratory syndrome coronavirus 2
  REGION 1..14: note = Table B: HLA-DPA1*01:03-B1*03:01L
VTPEANMDQESFGG

SEQ ID NO: 20902 - protein, 14 aa, Severe acute respiratory syndrome coronavirus 2
  REGION 1..14: note = Table B: HLA-DPA1*01:03-B1*03:01L
VVYRAFDIYNDKVA

SEQ ID NO: 20903 - protein, 15 aa, Severe acute respiratory syndrome coronavirus 2
  REGION 1..15: note = Table B: HLA-DPA1*01:03-B1*03:01L HLA-DRB1*11:03L HLA-DRB1*13:01L HLA-DRB1*07:01L HLA-DRB1*08:03L HLA-DRB1*15:01L
DDNLIDSYFVVKRHT

SEQ ID NO: 20904 - protein, 15 aa, Severe acute respiratory syndrome coronavirus 2
  REGION 1..15: note = Table B: HLA-DPA1*01:03-B1*03:01L
DNLIDSYFVVKRHTF

SEQ ID NO: 20905 - protein, 15 aa, Severe acute respiratory syndrome coronavirus 2
  REGION 1..15: note = Table B: HLA-DPA1*01:03-B1*03:01L HLA-DPA1*01:03-B1*02:01L
DSYFVVKRHTFSNYQ

SEQ ID NO: 20906 - protein, 16 aa, Severe acute respiratory syndrome coronavirus 2
  REGION 1..16: note = Table B: HLA-DPA1*01:03-B1*03:01L HLA-DPA1*03:01-B1*04:02L HLA-DRB1*11:01L HLA-DPA1*01:03-B1*04:02L HLA-DPA1*01:03-B1*02:01L
YFVVKRHTFSNYQHEE

SEQ ID NO: 20907 - protein, 15 aa, Severe acute respiratory syndrome coronavirus 2
  REGION 1..15: note = Table B: HLA-DPA1*01:03-B1*03:01L
IYNLLKDCPAVAKHD

SEQ ID NO: 20908 - protein, 14 aa, Severe acute respiratory syndrome coronavirus 2
  REGION 1..14: note = Table B: HLA-DPA1*01:03-B1*03:01L
NLLKDCPAVAKHDF

SEQ ID NO: 20909 - protein, 15 aa, Severe acute respiratory syndrome coronavirus 2
  REGION 1..15: note = Table B: HLA-DPA1*01:03-B1*03:01L
SRQRLTKYTMADLVY

SEQ ID NO: 20910 - protein, 10 aa, Severe acute respiratory syndrome coronavirus 2
  REGION 1..10: note = Table B: HLA-DPA1*01:03-B1*03:01L HLA-DQA1*05:05-B1*03:19L HLA-DQA1*05:01-B1*02:01L HLA-DPA1*01:03-B1*104:01L HLA-DRB1*16:01L
DDYFNKKDWY

SEQ ID NO: 20911 - protein, 15 aa, Severe acute respiratory syndrome coronavirus 2
  REGION 1..15: note = Table B: HLA-DPA1*01:03-B1*03:01L
QALLKTVQFCDAMRN

SEQ ID NO: 20912 - protein, 13 aa, Severe acute respiratory syndrome coronavirus 2
  REGION 1..13: note = Table B: HLA-DPA1*01:03-B1*03:01L HLA-DRB1*04:08L
DAMRNAGIVGVLT

SEQ ID NO: 20913 - protein, 11 aa, Severe acute respiratory syndrome coronavirus 2
  REGION 1..11: note = Table B: HLA-DPA1*01:03-B1*03:01L HLA-DPA1*01:03-B1*104:01L HLA-DRB1*16:01L
LDNQDLNGNWY

SEQ ID NO: 20914 - protein, 13 aa, Severe acute respiratory syndrome coronavirus 2
  REGION 1..13: note = Table B: HLA-DPA1*01:03-B1*03:01L HLA-DRB1*11:04L HLA-DRB1*14:02L HLA-DRB1*09:01L HLA-DRB1*12:02L HLA-DPA1*01:02-B1*04:01L HLA-DRB1*10:01L HLA-DRB1*04:08L
GDFIQTTPGSGVP

SEQ ID NO: 20915 - protein, 14 aa, Severe acute respiratory syndrome coronavirus 2
  REGION 1..14: note = Table B: HLA-DPA1*01:03-B1*03:01L
DFIQTTPGSGVPVV

SEQ ID NO: 20916 - protein, 15 aa, Severe acute respiratory syndrome coronavirus 2
  REGION 1..15: note = Table B: HLA-DPA1*01:03-B1*03:01L HLA-DQA1*05:01-B1*02:01L HLA-DPA1*01:03-B1*04:02L HLA-DQA1*05:05-B1*03:01L HLA-DPA1*01:02-B1*04:01L
VPVVDSYYSLLMPIL

SEQ ID NO: 20917 - protein, 16 aa, Severe acute respiratory syndrome coronavirus 2
  REGION 1..16: note = Table B: HLA-DPA1*01:03-B1*03:01L HLA-DRB1*11:02L HLA-DRB1*11:03L HLA-DRB1*11:04L HLA-DRB1*08:02L HLA-DRB1*08:03L
EERLKLFDRYFKYWDQ

SEQ ID NO: 20918 - protein, 16 aa, Severe acute respiratory syndrome coronavirus 2
  REGION 1..16: note = Table B: HLA-DPA1*01:03-B1*03:01L HLA-DRB1*11:02L HLA-DQA1*05:05-B1*03:19L
ERLKLFDRYFKYWDQT

SEQ ID NO: 20919 - protein, 14 aa, Severe acute respiratory syndrome coronavirus 2
  REGION 1..14: note = Table B: HLA-DPA1*01:03-B1*03:01L
FNVLFSTVFPPTSF

SEQ ID NO: 20920 - protein, 16 aa, Severe acute respiratory syndrome coronavirus 2
  REGION 1..16: note = Table B: HLA-DPA1*01:03-B1*03:01L HLA-DPA1*02:01-B1*13:01L
KRTTCFSVAALTNNVA

SEQ ID NO: 20921 - protein, 15 aa, Severe acute respiratory syndrome coronavirus 2
  REGION 1..15: note = Table B: HLA-DPA1*01:03-B1*03:01L HLA-DRB1*11:03L HLA-DRB1*11:04L HLA-DRB1*14:02L
AALTNNVAFQTVKPG

SEQ ID NO: 20922 - protein, 12 aa, Severe acute respiratory syndrome coronavirus 2
  REGION 1..12: note = Table B: HLA-DPA1*01:03-B1*03:01L HLA-DQA1*05:05-B1*03:19L HLA-DQA1*05:01-B1*02:01L HLA-DPA1*01:03-B1*104:01L
TVKPGNFNKDFY

SEQ ID NO: 20923 - protein, 11 aa, Severe acute respiratory syndrome coronavirus 2
  REGION 1..11: note = Table B: HLA-DPA1*01:03-B1*03:01L HLA-DQA1*05:05-B1*03:01L
FYDFAVSKGFF

SEQ ID NO: 20924 - protein, 18 aa, Severe acute respiratory syndrome coronavirus 2
  REGION 1..18: note = Table B: HLA-DPA1*01:03-B1*03:01L
VSKGFFKEGSSVELKHFF

SEQ ID NO: 20925 - protein, 15 aa, Severe acute respiratory syndrome coronavirus 2
  REGION 1..15: note = Table B: HLA-DPA1*01:03-B1*03:01L HLA-DQA1*01:01-B1*05:01L
VELKHFFFAQDGNAA

SEQ ID NO: 20926 - protein, 11 aa, Severe acute respiratory syndrome coronavirus 2
  REGION 1..11: note = Table B: HLA-DPA1*01:03-B1*03:01L HLA-DRB1*16:01L
DGNAAISDYDY

SEQ ID NO: 20927 - protein, 14 aa, Severe acute respiratory syndrome coronavirus 2
  REGION 1..14: note = Table B: HLA-DPA1*01:03-B1*03:01L HLA-DPA1*03:01-B1*04:02L HLA-DQA1*05:01-B1*02:01L HLA-DPA1*01:03-B1*104:01L HLA-DPA1*01:02-B1*04:01L HLA-DQA1*02:01-B1*03:03L
DIRQLLFVVEVVDK

SEQ ID NO: 20928 - protein, 15 aa, Severe acute respiratory syndrome coronavirus 2
  REGION 1..15: note = Table B: HLA-DPA1*01:03-B1*03:01L HLA-DRB1*11:02L HLA-DRB1*14:02L HLA-DPA1*01:03-B1*04:02L HLA-DPA1*02:01-B1*13:01L HLA-DRB1*08:02L HLA-DRB1*08:03L
FPFNKWGKARLYYDS

SEQ ID NO: 20929 - protein, 16 aa, Severe acute respiratory syndrome coronavirus 2
  REGION 1..16: note = Table B: HLA-DPA1*01:03-B1*03:01L HLA-DPA1*03:01-B1*105:01L
LKYAISAKNRARTVAG

SEQ ID NO: 20930 - protein, 15 aa, Severe acute respiratory syndrome coronavirus 2
  REGION 1..15: note = Table B: HLA-DPA1*01:03-B1*03:01L
RARTVAGVSICSTMT

SEQ ID NO: 20931 - protein, 16 aa, Severe acute respiratory syndrome coronavirus 2
  REGION 1..16: note = Table B: HLA-DPA1*01:03-B1*03:01L
LARKHTTCCSLSHRFY

SEQ ID NO: 20932 - protein, 14 aa, Severe acute respiratory syndrome coronavirus 2
  REGION 1..14: note = Table B: HLA-DPA1*01:03-B1*03:01L HLA-DRB1*14:02L
DFVNEFYAYLRKHF

SEQ ID NO: 20933 - protein, 14 aa, Severe acute respiratory syndrome coronavirus 2
  REGION 1..14: note = Table B: HLA-DPA1*01:03-B1*03:01L HLA-DRB1*11:02L
FVNEFYAYLRKHFS

SEQ ID NO: 20934 - protein, 11 aa, Severe acute respiratory syndrome coronavirus 2
  REGION 1..11: note = Table B: HLA-DPA1*01:03-B1*03:01L HLA-DQA1*01:01-B1*05:01L HLA-DRB1*11:01L HLA-DRB4*01:01L HLA-DPA1*01:03-B1*04:02L
VYLPYPDPSRI

SEQ ID NO: 20935 - protein, 12 aa, Severe acute respiratory syndrome coronavirus 2
  REGION 1..12: note = Table B: HLA-DPA1*01:03-B1*03:01L HLA-DPA1*03:01-B1*04:02L HLA-DQA1*01-B1*05L HLA-DPA1*03:01-B1*105:01L HLA-DRB1*15:03L
ERFVSLAIDAYP

SEQ ID NO: 20936 - protein, 16 aa, Severe acute respiratory syndrome coronavirus 2
  REGION 1..16: note = Table B: HLA-DPA1*01:03-B1*03:01L HLA-DRB1*14:02L HLA-DPA1*01:03-B1*04:01L HLA-DPA1*01:03-B1*104:01L HLA-DQA1*05:05-B1*03:01L HLA-DRB1*07:01L
DVFHLYLQYIRKLHDE

SEQ ID NO: 20937 - protein, 12 aa, Severe acute respiratory syndrome coronavirus 2
  REGION 1..12: note = Table B: HLA-DPA1*01:03-B1*03:01L
FYEAMYTPHTVL

SEQ ID NO: 20938 - protein, 12 aa, Severe acute respiratory syndrome coronavirus 2
  REGION 1..12: note = Table B: HLA-DPA1*01:03-B1*03:01L HLA-DRB1*04:10L
YEAMYTPHTVLQ

SEQ ID NO: 20939 - protein, 15 aa, Severe acute respiratory syndrome coronavirus 2
  REGION 1..15: note = Table B: HLA-DPA1*01:03-B1*03:01L HLA-DPA1*03:01-B1*04:02L HLA-DRB1*03:01L HLA-DRB1*11:02L HLA-DRB1*14:02L HLA-DQA1*05:05-B1*03:19L HLA-DRB1*13:01L HLA-DPA1*03:01-B1*105:01L HLA-DQA1*05:05-B1*03:01L
  REGION 1..15: note = CONT. FROM ABOVE: HLA-DQA1*01:03-B1*06:01L HLA-DRB1*08:02L
DHVISTSHKLVLSVN

SEQ ID NO: 20940 - protein, 12 aa, Severe acute respiratory syndrome coronavirus 2
  REGION 1..12: note = Table B: HLA-DPA1*01:03-B1*03:01L HLA-DQA1*01-B1*05L HLA-DQA1*05:05-B1*03:19L
VTDVTQLYLGGM

SEQ ID NO: 20941 - protein, 13 aa, Severe acute respiratory syndrome coronavirus 2
  REGION 1..13: note = Table B: HLA-DPA1*01:03-B1*03:01L HLA-DQA1*05:05-B1*03:19L HLA-DRB1*12:02L HLA-DRB1*08:02L
FGLYKNTCVGSDN

SEQ ID NO: 20942 - protein, 16 aa, Severe acute respiratory syndrome coronavirus 2
  REGION 1..16: note = Table B: HLA-DPA1*01:03-B1*03:01L HLA-DPA1*02:01-B1*13:01L
DNVTDFNAIATCDWTN

SEQ ID NO: 20943 - protein, 16 aa, Severe acute respiratory syndrome coronavirus 2
  REGION 1..16: note = Table B: HLA-DPA1*01:03-B1*03:01L HLA-DRB1*15:03L
DFNAIATCDWTNAGDY

SEQ ID NO: 20944 - protein, 13 aa, Severe acute respiratory syndrome coronavirus 2
  REGION 1..13: note = Table B: HLA-DPA1*01:03-B1*03:01L HLA-DRB1*14:17L
SYGIATVREVLSD

SEQ ID NO: 20945 - protein, 10 aa, Severe acute respiratory syndrome coronavirus 2
  REGION 1..10: note = Table B: HLA-DPA1*01:03-B1*03:01L HLA-DRB1*03:01L HLA-DQA1*05:05-B1*03:19M HLA-DQA1*05:01-B1*02:01L HLA-DPA1*01:03-B1*104:01L HLA-DRB1*16:01L
LSDRELHLSW

SEQ ID NO: 20946 - protein, 18 aa, Severe acute respiratory syndrome coronavirus 2
  REGION 1..18: note = Table B: HLA-DPA1*01:03-B1*03:01L
RPPLNRNYVFTGYRVTKN

SEQ ID NO: 20947 - protein, 19 aa, Severe acute respiratory syndrome coronavirus 2
  REGION 1..19: note = Table B: HLA-DPA1*01:03-B1*03:01L HLA-DRB1*14:02L HLA-DPA1*01:03-B1*104:01L
PPLNRNYVFTGYRVTKNSK

SEQ ID NO: 20948 - protein, 14 aa, Severe acute respiratory syndrome coronavirus 2
  REGION 1..14: note = Table B: HLA-DPA1*01:03-B1*03:01L
GYRVTKNSKVQIGE

SEQ ID NO: 20949 - protein, 10 aa, Severe acute respiratory syndrome coronavirus 2
  REGION 1..10: note = Table B: HLA-DPA1*01:03-B1*03:01L HLA-DQA1*01-B1*05L HLA-DQA1*05:05-B1*03:19L HLA-DQA1*05:01-B1*02:01L HLA-DPA1*01:03-B1*104:01L HLA-DRB1*16:01L
KGDYGDAVVY

SEQ ID NO: 20950 - protein, 14 aa, Severe acute respiratory syndrome coronavirus 2
  REGION 1..14: note = Table B: HLA-DPA1*01:03-B1*03:01L HLA-DQA1*05:05-B1*03:19L HLA-DRB1*16:01L
FVLTSHTVMPLSAP

SEQ ID NO: 20951 - protein, 14 aa, Severe acute respiratory syndrome coronavirus 2
  REGION 1..14: note = Table B: HLA-DPA1*01:03-B1*03:01L HLA-DRB1*04:10L HLA-DPA1*02:01-B1*13:01L HLA-DRB1*04:08L
VMPLSAPTLVPQEH

SEQ ID NO: 20952 - protein, 11 aa, Severe acute respiratory syndrome coronavirus 2
  REGION 1..11: note = Table B: HLA-DPA1*01:03-B1*03:01L HLA-DQA1*01:01-B1*05:01L HLA-DRB1*13:01L HLA-DRB1*04:10L HLA-DRB1*07:01L HLA-DRB1*15:03L
EFSSNVANYQK

SEQ ID NO: 20953 - protein, 14 aa, Severe acute respiratory syndrome coronavirus 2
  REGION 1..14: note = Table B: HLA-DPA1*01:03-B1*03:01L HLA-DQA1*05:05-B1*03:19L HLA-DPA1*02:01-B1*13:01L HLA-DQA1*05:05-B1*03:01L HLA-DRB1*15:03L
VGMQKYSTLQGPPG

SEQ ID NO: 20954 - protein, 18 aa, Severe acute respiratory syndrome coronavirus 2
  REGION 1..18: note = Table B: HLA-DPA1*01:03-B1*03:01L
AAVDALCEKALKYLPIDK

SEQ ID NO: 20955 - protein, 16 aa, Severe acute respiratory syndrome coronavirus 2
  REGION 1..16: note = Table B: HLA-DPA1*01:03-B1*03:01L HLA-DPA1*03:01-B1*04:02L HLA-DRB1*03:01L HLA-DRB1*11:02L HLA-DRB1*14:02L HLA-DPA1*01:03-B1*04:02L
ALKYLPIDKCSRIIPA

SEQ ID NO: 20956 - protein, 13 aa, Severe acute respiratory syndrome coronavirus 2
  REGION 1..13: note = Table B: HLA-DPA1*01:03-B1*03:01L HLA-DRB1*12:01L HLA-DPA1*03:01-B1*105:01L HLA-DRB1*14:17L HLA-DRB1*15:03L
TVNALPETTADIV

SEQ ID NO: 20957 - protein, 17 aa, Severe acute respiratory syndrome coronavirus 2
  REGION 1..17: note = Table B: HLA-DPA1*01:03-B1*03:01L HLA-DQA1*01:03-B1*06:01L
VNARLRAKHYVYIGDPA

SEQ ID NO: 20958 - protein, 13 aa, Severe acute respiratory syndrome coronavirus 2
  REGION 1..13: note = Table B: HLA-DPA1*01:03-B1*03:01L HLA-DRB1*08:01L HLA-DPA1*02:01-B1*13:01L
EYDYVIFTQTTET

SEQ ID NO: 20959 - protein, 13 aa, Severe acute respiratory syndrome coronavirus 2
  REGION 1..13: note = Table B: HLA-DPA1*01:03-B1*03:01L
ITRAKVGILCIMS

SEQ ID NO: 20960 - protein, 11 aa, Severe acute respiratory syndrome coronavirus 2
  REGION 1..11: note = Table B: HLA-DPA1*01:03-B1*03:01L HLA-DRB1*14:01L HLA-DPA1*01:03-B1*04:01L HLA-DPA1*01:03-B1*04:02L
DLYDKLQFTSL

SEQ ID NO: 20961 - protein, 12 aa, Severe acute respiratory syndrome coronavirus 2
  REGION 1..12: note = Table B: HLA-DPA1*01:03-B1*03:01L
ATLQAENVTGLF

SEQ ID NO: 20962 - protein, 16 aa, Severe acute respiratory syndrome coronavirus 2
  REGION 1..16: note = Table B: HLA-DPA1*01:03-B1*03:01L HLA-DPA1*03:01-B1*04:02L HLA-DRB1*11:02L HLA-DRB1*14:02L HLA-DQA1*01-B1*05L HLA-DQA1*05:05-B1*03:19L HLA-DRB4*01:01L HLA-DPA1*01:03-B1*04:02L HLA-DPA1*01:03-B1*104:01L
  REGION 1..16: note = CONT. FROM ABOVE: HLA-DQA1*05:05-B1*03:01L HLA-DQA1*01:03-B1*06: 01L HLA-DRB1*08:02L
DMTYRRLISMMGFKMN

SEQ ID NO: 20963 - protein, 17 aa, Severe acute respiratory syndrome coronavirus 2
  REGION 1..17: note = Table B: HLA-DPA1*01:03-B1*03:01L HLA-DQA1*05:05-B1*03:19L HLA-DQA1*05:01-B1*02:01L
TPNNTDFSRVSAKPPPG

SEQ ID NO: 20964 - protein, 12 aa, Severe acute respiratory syndrome coronavirus 2
  REGION 1..12: note = Table B: HLA-DPA1*01:03-B1*03:01L HLA-DPA1*01:03-B1*04:01L
IVQMLSDTLKNL

SEQ ID NO: 20965 - protein, 13 aa, Severe acute respiratory syndrome coronavirus 2
  REGION 1..13: note = Table B: HLA-DPA1*01:03-B1*03:01L HLA-DRB1*12:01L HLA-DRB1*04:08L
GFDYVYNPFMIDV

SEQ ID NO: 20966 - protein, 14 aa, Severe acute respiratory syndrome coronavirus 2
  REGION 1..14: note = Table B: HLA-DPA1*01:03-B1*03:01L HLA-DPA1*01:03-B1*04:02L
PFMIDVQQWGFTGN

SEQ ID NO: 20967 - protein, 13 aa, Severe acute respiratory syndrome coronavirus 2
  REGION 1..13: note = Table B: HLA-DPA1*01:03-B1*03:01L
WTIEYPIIGDELK

SEQ ID NO: 20968 - protein, 12 aa, Severe acute respiratory syndrome coronavirus 2
  REGION 1..12: note = Table B: HLA-DPA1*01:03-B1*03:01L HLA-DQA1*05:01-B1*02:01L HLA-DQA1*05:05-B1*03:01L HLA-DQA1*01:03-B1*06:01L HLA-DRB1*15:03L
FYDAQPCSDKAY

SEQ ID NO: 20969 - protein, 15 aa, Severe acute respiratory syndrome coronavirus 2
  REGION 1..15: note = Table B: HLA-DPA1*01:03-B1*03:01L HLA-DRB1*13:01L HLA-DPA1*01:03-B1*104:01L HLA-DRB1*10:01L HLA-DQA1*01:03-B1*06:01L
GGSLYVNKHAFHTPA

SEQ ID NO: 20970 - protein, 14 aa, Severe acute respiratory syndrome coronavirus 2
  REGION 1..14: note = Table B: HLA-DPA1*01:03-B1*03:01L HLA-DPA1*03:01-B1*04:02L HLA-DRB1*14:01L HLA-DRB1*08:01L HLA-DPA1*01:03-B1*04:02L HLA-DPA1*02:01-B1*13:01L HLA-DQA1*05:05-B1*03:01L
PFFYYSDSPCESHG

SEQ ID NO: 20971 - protein, 11 aa, Severe acute respiratory syndrome coronavirus 2
  REGION 1..11: note = Table B: HLA-DPA1*01:03-B1*03:01L HLA-DRB1*14:02L HLA-DPA1*02:01-B1*13:01L HLA-DQA1*02:01-B1*03:03L
SLWVYKQFDTY

SEQ ID NO: 20972 - protein, 14 aa, Severe acute respiratory syndrome coronavirus 2
  REGION 1..14: note = Table B: HLA-DPA1*01:03-B1*03:01L
VYKQFDTYNLWNTF

SEQ ID NO: 20973 - protein, 13 aa, Severe acute respiratory syndrome coronavirus 2
  REGION 1..13: note = Table B: HLA-DPA1*01:03-B1*03:01L HLA-DPA1*01:03-B1*04:01L HLA-DPA1*01:03-B1*04:02L HLA-DRB1*12:01L HLA-DRB1*04:08L HLA-DRB1*15:03L
VDGVDVELFENKT

SEQ ID NO: 20974 - protein, 14 aa, Severe acute respiratory syndrome coronavirus 2
  REGION 1..14: note = Table B: HLA-DPA1*01:03-B1*03:01L HLA-DPA1*02:01-B1*13:01L HLA-DQA1*05:05-B1*03:01L
IKPVPEVKILNNLG

SEQ ID NO: 20975 - protein, 13 aa, Severe acute respiratory syndrome coronavirus 2
  REGION 1..13: note = Table B: HLA-DPA1*01:03-B1*03:01L HLA-DPA1*02:01-B1*13:01L HLA-DPA1*03:01-B1*105:01L
YKRDAPAHISTIG

SEQ ID NO: 20976 - protein, 15 aa, Severe acute respiratory syndrome coronavirus 2
  REGION 1..15: note = Table B: HLA-DPA1*01:03-B1*03:01L HLA-DRB1*03:01L HLA-DRB1*14:02L HLA-DRB4*01:01L HLA-DPA1*01:03-B1*04:02L HLA-DRB3*01:01L
APLTVFFDGRVDGQV

SEQ ID NO: 20977 - protein, 14 aa, Severe acute respiratory syndrome coronavirus 2
  REGION 1..14: note = Table B: HLA-DPA1*01:03-B1*03:01L
GQVDLFRNARNGVL

SEQ ID NO: 20978 - protein, 14 aa, Severe acute respiratory syndrome coronavirus 2
  REGION 1..14: note = Table B: HLA-DPA1*01:03-B1*03:01L HLA-DQA1*01:01-B1*05:01L HLA-DRB1*08:01L HLA-DRB1*11:01L HLA-DPA1*02:01-B1*13:01L
GSVKGLQPSVGPKQ

SEQ ID NO: 20979 - protein, 13 aa, Severe acute respiratory syndrome coronavirus 2
  REGION 1..13: note = Table B: HLA-DPA1*01:03-B1*03:01L HLA-DRB1*12:01L HLA-DRB1*16:01L
VGPKQASLNGVTL

SEQ ID NO: 20980 - protein, 10 aa, Severe acute respiratory syndrome coronavirus 2
  REGION 1..10: note = Table B: HLA-DPA1*01:03-B1*03:01L HLA-DRB1*03:01L HLA-DRB1*11:02L HLA-DQA1*05:05-B1*03:19M HLA-DQA1*05:01-B1*02:01L HLA-DPA1*01:03-B1*104:01L HLA-DRB1*16:01L
FIERYKLEGY

SEQ ID NO: 20981 - protein, 18 aa, Severe acute respiratory syndrome coronavirus 2
  REGION 1..18: note = Table B: HLA-DPA1*01:03-B1*03:01L HLA-DRB1*14:02L HLA-DQA1*05:05-B1*03:19L HLA-DPA1*03:01-B1*105:01L
GGLHLLIGLAKRFKESPF

SEQ ID NO: 20982 - protein, 18 aa, Severe acute respiratory syndrome coronavirus 2
  REGION 1..18: note = Table B: HLA-DPA1*01:03-B1*03:01L HLA-DRB1*03:01L HLA-DQA1*05:05-B1*03:116L HLA-DPA1*01:03-B1*104:01L HLA-DQA1*05:05-B1*03:01L
GLHLLIGLAKRFKESPFE

SEQ ID NO: 20983 - protein, 14 aa, Severe acute respiratory syndrome coronavirus 2
  REGION 1..14: note = Table B: HLA-DPA1*01:03-B1*03:01L
GLAKRFKESPFELE

SEQ ID NO: 20984 - protein, 16 aa, Severe acute respiratory syndrome coronavirus 2
  REGION 1..16: note = Table B: HLA-DPA1*01:03-B1*03:01L HLA-DPA1*01:03-B1*104:01L
YTEISFMLWCKDGHVE

SEQ ID NO: 20985 - protein, 11 aa, Severe acute respiratory syndrome coronavirus 2
  REGION 1..11: note = Table B: HLA-DPA1*01:03-B1*03:01L HLA-DRB1*14:02L HLA-DPA1*01:03-B1*104:01L HLA-DRB1*16:01L HLA-DRB1*15:03L
WQPGVAMPNLY

SEQ ID NO: 20986 - protein, 11 aa, Severe acute respiratory syndrome coronavirus 2
  REGION 1..11: note = Table B: HLA-DPA1*01:03-B1*03:01L HLA-DQA1*05:01-B1*02:01L HLA-DQA1*01:03-B1*06:01L HLA-DQA1*02:01-B1*03:03L
NVAKYTQLCQY

SEQ ID NO: 20987 - protein, 13 aa, Severe acute respiratory syndrome coronavirus 2
  REGION 1..13: note = Table B: HLA-DPA1*01:03-B1*03:01L HLA-DQA1*01:03-B1*06:01L
GAGSDKGVAPGTA

SEQ ID NO: 20988 - protein, 15 aa, Severe acute respiratory syndrome coronavirus 2
  REGION 1..15: note = Table B: HLA-DPA1*01:03-B1*03:01L HLA-DRB1*15:03L
AGSDKGVAPGTAVLR

SEQ ID NO: 20989 - protein, 19 aa, Severe acute respiratory syndrome coronavirus 2
  REGION 1..19: note = Table B: HLA-DPA1*01:03-B1*03:01L HLA-DPA1*01:03-B1*04:02L
PTGTLLVDSDLNDFVSDAD

SEQ ID NO: 20990 - protein, 16 aa, Severe acute respiratory syndrome coronavirus 2
  REGION 1..16: note = Table B: HLA-DPA1*01:03-B1*03:01L HLA-DRB1*11:02L HLA-DRB1*14:02L HLA-DQA1*05:05-B1*03:19L HLA-DPA1*01:03-B1*04:01L HLA-DPA1*02:01-B1*13:01L
EAFLIGCNYLGKPREQ

SEQ ID NO: 20991 - protein, 13 aa, Severe acute respiratory syndrome coronavirus 2
  REGION 1..13: note = Table B: HLA-DPA1*01:03-B1*03:01L
NPIQLSSYSLFDM

SEQ ID NO: 20992 - protein, 16 aa, Severe acute respiratory syndrome coronavirus 2
  REGION 1..16: note = Table B: HLA-DPA1*01:03-B1*03:01L
AVMSLKEGQINDMILS

SEQ ID NO: 20993 - protein, 16 aa, Severe acute respiratory syndrome coronavirus 2
  REGION 1..16: note = Table B: HLA-DPA1*01:03-B1*03:01L HLA-DRB1*14:02L HLA-DQA1*05:05-B1*03:19L HLA-DPA1*03:01-B1*105:01L
ILSLLSKGRLIIRENN

SEQ ID NO: 20994 - protein, 14 aa, Severe acute respiratory syndrome coronavirus 2
  REGION 1..14: note = Table B: HLA-DPA1*01:03-B1*03:01L
TRTQLPPAYTNSFT

SEQ ID NO: 20995 - protein, 15 aa, Severe acute respiratory syndrome coronavirus 2
  REGION 1..15: note = Table B: HLA-DPA1*01:03-B1*03:01L HLA-DPA1*02:01-B1*13:01L HLA-DQA1*05:05-B1*03:01L
NVVIKVCEFQFCNDP

SEQ ID NO: 20996 - protein, 10 aa, Severe acute respiratory syndrome coronavirus 2
  REGION 1..10: note = Table B: HLA-DPA1*01:03-B1*03:01L HLA-DQA1*05:05-B1*03:19M HLA-DQA1*05:01-B1*02:01L HLA-DPA1*01:03-B1*104:01L
CNDPFLGVYY

SEQ ID NO: 20997 - protein, 16 aa, Severe acute respiratory syndrome coronavirus 2
  REGION 1..16: note = Table B: HLA-DPA1*01:03-B1*03:01L HLA-DRB1*13:01L HLA-DPA1*01:03-B1*104:01L HLA-DQA1*05:05-B1*03:01L
LGVYYHKNNKSWMESE

SEQ ID NO: 20998 - protein, 16 aa, Severe acute respiratory syndrome coronavirus 2
  REGION 1..16: note = Table B: HLA-DPA1*01:03-B1*03:01L
GVYYHKNNKSWMESEF

SEQ ID NO: 20999 - protein, 16 aa, Severe acute respiratory syndrome coronavirus 2
  REGION 1..16: note = Table B: HLA-DPA1*01:03-B1*03:01L HLA-DRB1*03:01L
VYYHKNNKSWMESEFR

SEQ ID NO: 21000 - protein, 12 aa, Severe acute respiratory syndrome coronavirus 2
  REGION 1..12: note = Table B: HLA-DPA1*01:03-B1*03:01L HLA-DRB1*12:01L
FRVYSSANNCTF

SEQ ID NO: 21001 - protein, 12 aa, Severe acute respiratory syndrome coronavirus 2
  REGION 1..12: note = Table B: HLA-DPA1*01:03-B1*03:01L HLA-DRB1*14:02L HLA-DRB1*12:01L HLA-DPA1*03:01-B1*105:01L HLA-DPA1*01:03-B1*104:01L HLA-DQA1*05:05-B1*03:01L HLA-DQA1*02:01-B1*03:03L
VYSSANNCTFEY

SEQ ID NO: 21002 - protein, 18 aa, Severe acute respiratory syndrome coronavirus 2
  REGION 1..18: note = Table B: HLA-DPA1*01:03-B1*03:01L HLA-DRB1*11:02L HLA-DQA1*05:05-B1*03:19L HLA-DPA1*01:03-B1*04:02L HLA-DQA1*05:05-B1*03:01L
GKQGNFKNLREFVFKNID

SEQ ID NO: 21003 - protein, 18 aa, Severe acute respiratory syndrome coronavirus 2
  REGION 1..18: note = Table B: HLA-DPA1*01:03-B1*03:01L HLA-DPA1*01:03-B1*04:02L
KQGNFKNLREFVFKNIDG

SEQ ID NO: 21004 - protein, 18 aa, Severe acute respiratory syndrome coronavirus 2
  REGION 1..18: note = Table B: HLA-DPA1*01:03-B1*03:01L HLA-DQA1*05:05-B1*03:01L
FKIYSKHTPINLVRDLPQ

SEQ ID NO: 21005 - protein, 11 aa, Severe acute respiratory syndrome coronavirus 2
  REGION 1..11: note = Table B: HLA-DPA1*01:03-B1*03:01L
NLVRDLPQGFS

SEQ ID NO: 21006 - protein, 12 aa, Severe acute respiratory syndrome coronavirus 2
  REGION 1..12: note = Table B: HLA-DPA1*01:03-B1*03:01L HLA-DPA1*01:03-B1*104:01L
WTAGAAAYYVGY

SEQ ID NO: 21007 - protein, 11 aa, Severe acute respiratory syndrome coronavirus 2
  REGION 1..11: note = Table B: HLA-DPA1*01:03-B1*03:01L HLA-DRB1*14:02L HLA-DQA1*01-B1*05L HLA-DRB4*01:01L HLA-DPA1*01:03-B1*04:01L HLA-DPA1*01:03-B1*04:02L HLA-DPA1*02:01-B1*13:01L HLA-DPA1*01:03-B1*104:01L HLA-DRB1*16:01L
  REGION 1..11: note = CONT. FROM ABOVE: HLA-DQA1*01:03-B1*06:01L
YLQPRTFLLKY

SEQ ID NO: 21008 - protein, 18 aa, Severe acute respiratory syndrome coronavirus 2
  REGION 1..18: note = Table B: HLA-DPA1*01:03-B1*03:01L
DPLSETKCTLKSFTVEKG

SEQ ID NO: 21009 - protein, 13 aa, Severe acute respiratory syndrome coronavirus 2
  REGION 1..13: note = Table B: HLA-DPA1*01:03-B1*03:01L HLA-DPA1*02:01-B1*13:01L
SPTKLNDLCFTNV

SEQ ID NO: 21010 - protein, 12 aa, Severe acute respiratory syndrome coronavirus 2
  REGION 1..12: note = Table B: HLA-DPA1*01:03-B1*03:01L HLA-DPA1*03:01-B1*04:02L HLA-DRB1*14:01L HLA-DPA1*01:03-B1*04:01L HLA-DRB1*12:01L HLA-DPA1*01:03-B1*104:01L HLA-DPA1*01:02-B1*04:01L HLA-DRB1*16:01L HLA-DRB1*04:08L
IAPGQTGKIADY

SEQ ID NO: 21011 - protein, 13 aa, Severe acute respiratory syndrome coronavirus 2
  REGION 1..13: note = Table B: HLA-DPA1*01:03-B1*03:01L HLA-DRB1*14:02L HLA-DQA1*05:05-B1*03:19L HLA-DPA1*02:01-B1*13:01L
IAWNSNNLDSKVG

SEQ ID NO: 21012 - protein, 14 aa, Severe acute respiratory syndrome coronavirus 2
  REGION 1..14: note = Table B: HLA-DPA1*01:03-B1*03:01L HLA-DPA1*03:01-B1*04:02L HLA-DRB1*11:01L HLA-DQA1*01-B1*05L HLA-DRB1*07:01L HLA-DRB1*08:03L
ISTEIYQAGSTPCN

SEQ ID NO: 21013 - protein, 14 aa, Severe acute respiratory syndrome coronavirus 2
  REGION 1..14: note = Table B: HLA-DPA1*01:03-B1*03:01L HLA-DPA1*01:03-B1*04:02L HLA-DRB1*12:01L HLA-DRB1*16:01L HLA-DRB1*04:08L
QPYRVVVLSFELLH

SEQ ID NO: 21014 - protein, 14 aa, Severe acute respiratory syndrome coronavirus 2
  REGION 1..14: note = Table B: HLA-DPA1*01:03-B1*03:01L HLA-DRB1*14:02L
VNFNFNGLTGTGVL

SEQ ID NO: 21015 - protein, 13 aa, Severe acute respiratory syndrome coronavirus 2
  REGION 1..13: note = Table B: HLA-DPA1*01:03-B1*03:01L HLA-DRB1*08:01L
GLTGTGVLTESNK

SEQ ID NO: 21016 - protein, 16 aa, Severe acute respiratory syndrome coronavirus 2
  REGION 1..16: note = Table B: HLA-DPA1*01:03-B1*03:01L HLA-DQA1*05:05-B1*03:01L
DAVRDPQTLEILDITP

SEQ ID NO: 21017 - protein, 15 aa, Severe acute respiratory syndrome coronavirus 2
  REGION 1..15: note = Table B: HLA-DPA1*01:03-B1*03:01L HLA-DPA1*02:01-B1*13:01L HLA-DRB1*15:03L
DVNCTEVPVAIHADQ

SEQ ID NO: 21018 - protein, 16 aa, Severe acute respiratory syndrome coronavirus 2
  REGION 1..16: note = Table B: HLA-DPA1*01:03-B1*03:01L HLA-DPA1*02:01-B1*13:01L
GSNVFQTRAGCLIGAE

SEQ ID NO: 21019 - protein, 13 aa, Severe acute respiratory syndrome coronavirus 2
  REGION 1..13: note = Table B: HLA-DPA1*01:03-B1*03:01L HLA-DPA1*01:03-B1*04:02L HLA-DRB1*04:08L
YSNNSIAIPTNFT

SEQ ID NO: 21020 - protein, 13 aa, Severe acute respiratory syndrome coronavirus 2
  REGION 1..13: note = Table B: HLA-DPA1*01:03-B1*03:01L
VTTEILPVSMTKT

SEQ ID NO: 21021 - protein, 15 aa, Severe acute respiratory syndrome coronavirus 2
  REGION 1..15: note = Table B: HLA-DPA1*01:03-B1*03:01L HLA-DPA1*02:01-B1*13:01L
NLLLQYGSFCTQLNR

SEQ ID NO: 21022 - protein, 14 aa, Severe acute respiratory syndrome coronavirus 2
  REGION 1..14: note = Table B: HLA-DPA1*01:03-B1*03:01L HLA-DRB1*11:03L
LTGIAVEQDKNTQE

SEQ ID NO: 21023 - protein, 14 aa, Severe acute respiratory syndrome coronavirus 2
  REGION 1..14: note = Table B: HLA-DPA1*01:03-B1*03:01L HLA-DQA1*05:05-B1*03:01L
IYKTPPIKDFGGFN

SEQ ID NO: 21024 - protein, 12 aa, Severe acute respiratory syndrome coronavirus 2
  REGION 1..12: note = Table B: HLA-DPA1*01:03-B1*03:01L HLA-DRB1*04:08L
KVTLADAGFIKQ

SEQ ID NO: 21025 - protein, 18 aa, Severe acute respiratory syndrome coronavirus 2
  REGION 1..18: note = Table B: HLA-DPA1*01:03-B1*03:01L
ARDLICAQKFNGLTVLPP

SEQ ID NO: 21026 - protein, 13 aa, Severe acute respiratory syndrome coronavirus 2
  REGION 1..13: note = Table B: HLA-DPA1*01:03-B1*03:01L HLA-DRB1*14:02L HLA-DQA1*05:01-B1*02:01L HLA-DPA1*01:03-B1*04:01L HLA-DPA1*01:03-B1*04:02L HLA-DPA1*02:01-B1*13:01L HLA-DQA1*03:01-B1*03:02L HLA-DPA1*01:03-B1*104:01L
  REGION 1..13: note = CONT. FROM ABOVE: HLA-DPA1*01:02-B1*04:01L
IAQYTSALLAGTI

SEQ ID NO: 21027 - protein, 15 aa, Severe acute respiratory syndrome coronavirus 2
  REGION 1..15: note = Table B: HLA-DPA1*01:03-B1*03:01L HLA-DPA1*01:03-B1*04:02L
SGWTFGAGAALQIPF

SEQ ID NO: 21028 - protein, 13 aa, Severe acute respiratory syndrome coronavirus 2
  REGION 1..13: note = Table B: HLA-DPA1*01:03-B1*03:01L HLA-DRB1*14:01L
AGAALQIPFAMQM

SEQ ID NO: 21029 - protein, 15 aa, Severe acute respiratory syndrome coronavirus 2
  REGION 1..15: note = Table B: HLA-DPA1*01:03-B1*03:01L HLA-DRB1*07:01L
VTQNVLYENQKLIAN

SEQ ID NO: 21030 - protein, 14 aa, Severe acute respiratory syndrome coronavirus 2
  REGION 1..14: note = Table B: HLA-DPA1*01:03-B1*03:01L HLA-DPA1*02:01-B1*13:01L
AIGKIQDSLSSTAS

SEQ ID NO: 21031 - protein, 14 aa, Severe acute respiratory syndrome coronavirus 2
  REGION 1..14: note = Table B: HLA-DPA1*01:03-B1*03:01L
VNQNAQALNTLVKQ

SEQ ID NO: 21032 - protein, 15 aa, Severe acute respiratory syndrome coronavirus 2
  REGION 1..15: note = Table B: HLA-DPA1*01:03-B1*03:01L HLA-DPA1*01:03-B1*104:01L
ILSRLDKVEAEVQID

SEQ ID NO: 21033 - protein, 12 aa, Severe acute respiratory syndrome coronavirus 2
  REGION 1..12: note = Table B: HLA-DPA1*01:03-B1*03:01L
IRASANLAATKM

SEQ ID NO: 21034 - protein, 14 aa, Severe acute respiratory syndrome coronavirus 2
  REGION 1..14: note = Table B: HLA-DPA1*01:03-B1*03:01L HLA-DPA1*01:03-B1*02:01L
ASANLAATKMSECV

SEQ ID NO: 21035 - protein, 13 aa, Severe acute respiratory syndrome coronavirus 2
  REGION 1..13: note = Table B: HLA-DPA1*01:03-B1*03:01L HLA-DPA1*02:01-B1*13:01L HLA-DPA1*03:01-B1*105:01L HLA-DQA1*05:05-B1*03:01L HLA-DQA1*02:01-B1*03:03L
AATKMSECVLGQS

SEQ ID NO: 21036 - protein, 13 aa, Severe acute respiratory syndrome coronavirus 2
  REGION 1..13: note = Table B: HLA-DPA1*01:03-B1*03:01L HLA-DQA1*01:01-B1*05:01L HLA-DQA1*01-B1*05L HLA-DQA1*05:05-B1*03:19L HLA-DPA1*02:01-B1*13:01L
YHLMSFPQSAPHG

SEQ ID NO: 21037 - protein, 12 aa, Severe acute respiratory syndrome coronavirus 2
  REGION 1..12: note = Table B: HLA-DPA1*01:03-B1*03:01L
EKNFTTAPAICH

SEQ ID NO: 21038 - protein, 15 aa, Severe acute respiratory syndrome coronavirus 2
  REGION 1..15: note = Table B: HLA-DPA1*01:03-B1*03:01L
PAICHDGKAHFPREG

SEQ ID NO: 21039 - protein, 13 aa, Severe acute respiratory syndrome coronavirus 2
  REGION 1..13: note = Table B: HLA-DPA1*01:03-B1*03:01L HLA-DQA1*01:01-B1*05:01L HLA-DRB1*04:08L HLA-DRB1*15:03L
DISGINASVVNIQ

SEQ ID NO: 21040 - protein, 11 aa, Severe acute respiratory syndrome coronavirus 2
  REGION 1..11: note = Table B: HLA-DPA1*01:03-B1*03:01L HLA-DQA1*05:05-B1*03:116L HLA-DRB1*04:10L HLA-DPA1*01:02-B1*04:01L HLA-DRB1*15:03L
INASVVNIQKE

SEQ ID NO: 21041 - protein, 16 aa, Severe acute respiratory syndrome coronavirus 2
  REGION 1..16: note = Table B: HLA-DPA1*01:03-B1*03:01L
EDDSEPVLKGVKLHYT

SEQ ID NO: 21042 - protein, 14 aa, Severe acute respiratory syndrome coronavirus 2
  REGION 1..14: note = Table B: HLA-DPA1*01:03-B1*03:01L
IFTIGTVTLKQGEI

SEQ ID NO: 21043 - protein, 14 aa, Severe acute respiratory syndrome coronavirus 2
  REGION 1..14: note = Table B: HLA-DPA1*01:03-B1*03:01L
ATATIPIQASLPFG

SEQ ID NO: 21044 - protein, 14 aa, Severe acute respiratory syndrome coronavirus 2
  REGION 1..14: note = Table B: HLA-DPA1*01:03-B1*03:01L
VGVALLAVFQSASK

SEQ ID NO: 21045 - protein, 13 aa, Severe acute respiratory syndrome coronavirus 2
  REGION 1..13: note = Table B: HLA-DPA1*01:03-B1*03:01L HLA-DQA1*05:05-B1*03:01L
VYSHLLLVAAGLE

SEQ ID NO: 21046 - protein, 11 aa, Severe acute respiratory syndrome coronavirus 2
  REGION 1..11: note = Table B: HLA-DPA1*01:03-B1*03:01L HLA-DRB1*12:01L HLA-DQA1*05:05-B1*03:01L HLA-DRB1*04:08L
FLQSINFVRII

SEQ ID NO: 21047 - protein, 15 aa, Severe acute respiratory syndrome coronavirus 2
  REGION 1..15: note = Table B: HLA-DPA1*01:03-B1*03:01L HLA-DRB1*08:01L HLA-DRB1*11:01L HLA-DPA1*03:01-B1*105:01L
VITSGDGTTSPISEH

SEQ ID NO: 21048 - protein, 15 aa, Severe acute respiratory syndrome coronavirus 2
  REGION 1..15: note = Table B: HLA-DPA1*01:03-B1*03:01L
SGVKDCVVLHSYFTS

SEQ ID NO: 21049 - protein, 16 aa, Severe acute respiratory syndrome coronavirus 2
  REGION 1..16: note = Table B: HLA-DPA1*01:03-B1*03:01L HLA-DQA1*05:01-B1*02:01L HLA-DPA1*01:03-B1*104:01L
VEHVTFFIYNKIVDEP

SEQ ID NO: 21050 - protein, 13 aa, Severe acute respiratory syndrome coronavirus 2
  REGION 1..13: note = Table B: HLA-DPA1*01:03-B1*03:01L HLA-DRB1*11:03L
SFVSEETGTLIVN

SEQ ID NO: 21051 - protein, 13 aa, Severe acute respiratory syndrome coronavirus 2
  REGION 1..13: note = Table B: HLA-DPA1*01:03-B1*03:01L HLA-DQA1*01-B1*05L
VSEETGTLIVNSV

SEQ ID NO: 21052 - protein, 12 aa, Severe acute respiratory syndrome coronavirus 2
  REGION 1..12: note = Table B: HLA-DPA1*01:03-B1*03:01L
LVTLAILTALRL

SEQ ID NO: 21053 - protein, 11 aa, Severe acute respiratory syndrome coronavirus 2
  REGION 1..11: note = Table B: HLA-DPA1*01:03-B1*03:01L HLA-DPA1*03:01-B1*04:02L HLA-DRB1*14:01L HLA-DRB1*14:02L HLA-DPA1*01:03-B1*04:01L HLA-DPA1*02:01-B1*13:01L HLA-DQA1*05:05-B1*03:01L
IVNVSLVKPSF

SEQ ID NO: 21054 - protein, 11 aa, Severe acute respiratory syndrome coronavirus 2
  REGION 1..11: note = Table B: HLA-DPA1*01:03-B1*03:01L
FAYANRNRFLY

SEQ ID NO: 21055 - protein, 14 aa, Severe acute respiratory syndrome coronavirus 2
  REGION 1..14: note = Table B: HLA-DPA1*01:03-B1*03:01L
ITGGIAIAMACLVG

SEQ ID NO: 21056 - protein, 15 aa, Severe acute respiratory syndrome coronavirus 2
  REGION 1..15: note = Table B: HLA-DPA1*01:03-B1*03:01L
FARTRSMWSFNPETN

SEQ ID NO: 21057 - protein, 12 aa, Severe acute respiratory syndrome coronavirus 2
  REGION 1..12: note = Table B: HLA-DPA1*01:03-B1*03:01L HLA-DPA1*01:03-B1*04:02L
SMWSFNPETNIL

SEQ ID NO: 21058 - protein, 15 aa, Severe acute respiratory syndrome coronavirus 2
  REGION 1..15: note = Table B: HLA-DPA1*01:03-B1*03:01L
HGTILTRPLLESELV

SEQ ID NO: 21059 - protein, 15 aa, Severe acute respiratory syndrome coronavirus 2
  REGION 1..15: note = Table B: HLA-DPA1*01:03-B1*03:01L HLA-DPA1*01:03-B1*04:02L
ESELVIGAVILRGHL

SEQ ID NO: 21060 - protein, 12 aa, Severe acute respiratory syndrome coronavirus 2
  REGION 1..12: note = Table B: HLA-DPA1*01:03-B1*03:01L
YKLGASQRVAGD

SEQ ID NO: 21061 - protein, 12 aa, Severe acute respiratory syndrome coronavirus 2
  REGION 1..12: note = Table B: HLA-DPA1*01:03-B1*03:01L
LVDFQVTIAEIL

SEQ ID NO: 21062 - protein, 15 aa, Severe acute respiratory syndrome coronavirus 2
  REGION 1..15: note = Table B: HLA-DPA1*01:03-B1*03:01L
IAEILLIIMRTFKVS

SEQ ID NO: 21063 - protein, 14 aa, Severe acute respiratory syndrome coronavirus 2
  REGION 1..14: note = Table B: HLA-DPA1*01:03-B1*03:01L HLA-DPA1*01:03-B1*04:02L
LITLATCELYHYQE

SEQ ID NO: 21064 - protein, 15 aa, Severe acute respiratory syndrome coronavirus 2
  REGION 1..15: note = Table B: HLA-DPA1*01:03-B1*03:01L HLA-DRB1*03:01L HLA-DRB1*11:02L HLA-DRB1*14:02L HLA-DPA1*01:03-B1*04:02L HLA-DPA1*01:03-B1*02:01L HLA-DRB1*14:17L HLA-DRB1*08:02L HLA-DRB1*08:03L
SKWYIRVGARKSAPL

SEQ ID NO: 21065 - protein, 14 aa, Severe acute respiratory syndrome coronavirus 2
  REGION 1..14: note = Table B: HLA-DPA1*01:03-B1*03:01L HLA-DPA1*02:01-B1*13:01L HLA-DPA1*01:03-B1*104:01L
GARKSAPLIELCVD

SEQ ID NO: 21066 - protein, 13 aa, Severe acute respiratory syndrome coronavirus 2
  REGION 1..13: note = Table B: HLA-DPA1*01:03-B1*03:01L
DIGNYTVSCLPFT

SEQ ID NO: 21067 - protein, 20 aa, Severe acute respiratory syndrome coronavirus 2
  REGION 1..20: note = Table B: HLA-DPA1*01:03-B1*03:01L
SPDDQIGYYRRATRRIRGGD

SEQ ID NO: 21068 - protein, 10 aa, Severe acute respiratory syndrome coronavirus 2
  REGION 1..10: note = Table B: HLA-DPA1*01:03-B1*03:01L HLA-DRB1*03:01L HLA-DRB1*11:02L HLA-DQA1*01-B1*05L HLA-DQA1*05:05-B1*03:19M HLA-DQA1*05:01-B1*02:01L HLA-DRB4*01:01L HLA-DPA1*01:03-B1*104:01L HLA-DRB1*16:01L
  REGION 1..10: note = CONT. FROM ABOVE: HLA-DQA1*02:01-B1*03:03L
KDLSPRWYFY

SEQ ID NO: 21069 - protein, 14 aa, Severe acute respiratory syndrome coronavirus 2
  REGION 1..14: note = Table B: HLA-DPA1*01:03-B1*03:01L HLA-DRB1*13:01L
ALLLLDRLNQLESK

SEQ ID NO: 21070 - protein, 17 aa, Severe acute respiratory syndrome coronavirus 2
  REGION 1..17: note = Table B: HLA-DPA1*01:03-B1*03:01L HLA-DRB1*11:02L
ATKAYNVTQAFGRRGPE

SEQ ID NO: 21071 - protein, 14 aa, Severe acute respiratory syndrome coronavirus 2
  REGION 1..14: note = Table B: HLA-DPA1*01:03-B1*03:01L HLA-DQA1*05:05-B1*03:19L HLA-DPA1*03:01-B1*105:01L HLA-DRB1*04:08L
HWPQIAQFAPSASA

SEQ ID NO: 21072 - protein, 19 aa, Severe acute respiratory syndrome coronavirus 2
  REGION 1..19: note = Table B: HLA-DPA1*01:03-B1*03:01L HLA-DPA1*01:03-B1*104:01L
PSASAFFGMSRIGMEVTPS

SEQ ID NO: 21073 - protein, 12 aa, Severe acute respiratory syndrome coronavirus 2
  REGION 1..12: note = Table B: HLA-DPA1*01:03-B1*03:01L HLA-DRB1*03:01L HLA-DRB1*11:03L HLA-DRB1*14:02L HLA-DRB1*11:01L HLA-DRB3*01:01L
GAIKLDDKDPNF

SEQ ID NO: 21074 - protein, 12 aa, Severe acute respiratory syndrome coronavirus 2
  REGION 1..12: note = Table B: HLA-DPA1*01:03-B1*03:01L HLA-DRB1*14:02L HLA-DQA1*05:01-B1*02:01L
IKLDDKDPNFKD

SEQ ID NO: 21075 - protein, 16 aa, Severe acute respiratory syndrome coronavirus 2
  REGION 1..16: note = Table B: HLA-DPA1*03:01-B1*04:02L HLA-DRB1*03:01L HLA-DRB1*11:02L HLA-DRB1*14:02L HLA-DQA1*05:05-B1*03:19L HLA-DRB1*13:01L HLA-DQA1*05:05-B1*03:116L HLA-DPA1*01:03-B1*04:02L HLA-DPA1*02:01-B1*13:01L
  REGION 1..16: note = CONT. FROM ABOVE: HLA-DPA1*03:01-B1*105:01L HLA-DPA1*01:03-B1*02 :01L HLA-DQA1*05:05-B1*03:01L HLA-DPA1*01:02-B1*04:01L HLA-DRB1* 07:01L HLA-DRB1*10:01L HLA-DRB1*08:02L
QPYVFIKRSDARTAPH

SEQ ID NO: 21076 - protein, 13 aa, Severe acute respiratory syndrome coronavirus 2
  REGION 1..13: note = Table B: HLA-DPA1*03:01-B1*04:02L HLA-DPA1*01:02-B1*04:01L
VLVPHVGEIPVAY

SEQ ID NO: 21077 - protein, 12 aa, Severe acute respiratory syndrome coronavirus 2
  REGION 1..12: note = Table B: HLA-DPA1*03:01-B1*04:02L HLA-DPA1*01:03-B1*04:01L HLA-DRB1*12:01L HLA-DPA1*01:02-B1*04:01L HLA-DRB1*16:01L HLA-DRB1*15:03L
GDELGTDPYEDF

SEQ ID NO: 21078 - protein, 11 aa, Severe acute respiratory syndrome coronavirus 2
  REGION 1..11: note = Table B: HLA-DPA1*03:01-B1*04:02L HLA-DQA1*01-B1*05L HLA-DQA1*05:01-B1*02:01L HLA-DPA1*03:01-B1*105:01L HLA-DQA1*01:03-B1*06:01L
ELGTDPYEDFQ

SEQ ID NO: 21079 - protein, 12 aa, Severe acute respiratory syndrome coronavirus 2
  REGION 1..12: note = Table B: HLA-DPA1*03:01-B1*04:02L HLA-DPA1*03:01-B1*105:01L HLA-DRB1*16:01L HLA-DQA1*01:03-B1*06:01L HLA-DQA1*02:01-B1*03:03L
LGTDPYEDFQEN

SEQ ID NO: 21080 - protein, 16 aa, Severe acute respiratory syndrome coronavirus 2
  REGION 1..16: note = Table B: HLA-DPA1*03:01-B1*04:02L HLA-DRB1*14:02L HLA-DPA1*01:03-B1*04:02L HLA-DPA1*01:03-B1*104:01L
FDTFNGECPNFVFPLN

SEQ ID NO: 21081 - protein, 13 aa, Severe acute respiratory syndrome coronavirus 2
  REGION 1..13: note = Table B: HLA-DPA1*03:01-B1*04:02L HLA-DPA1*01:02-B1*04:01L
TIAFGGCVFSYVG

SEQ ID NO: 21082 - protein, 14 aa, Severe acute respiratory syndrome coronavirus 2
  REGION 1..14: note = Table B: HLA-DPA1*03:01-B1*04:02L
EGLNDNLLEILQKE

SEQ ID NO: 21083 - protein, 16 aa, Severe acute respiratory syndrome coronavirus 2
  REGION 1..16: note = Table B: HLA-DPA1*03:01-B1*04:02L HLA-DQA1*05:05-B1*03:19L
ILQKEKVNINIVGDFK

SEQ ID NO: 21084 - protein, 13 aa, Severe acute respiratory syndrome coronavirus 2
  REGION 1..13: note = Table B: HLA-DPA1*03:01-B1*04:02L HLA-DPA1*01:03-B1*04:01L HLA-DRB1*04:10L HLA-DPA1*02:01-B1*13:01L HLA-DPA1*01:03-B1*104:01L
SASTSAFVETVKG

SEQ ID NO: 21085 - protein, 10 aa, Severe acute respiratory syndrome coronavirus 2
  REGION 1..10: note = Table B: HLA-DPA1*03:01-B1*04:02L HLA-DQA1*05:05-B1*03:19L HLA-DPA1*01:02-B1*04:01L HLA-DRB1*16:01L
GLDYKAFKQI

SEQ ID NO: 21086 - protein, 10 aa, Severe acute respiratory syndrome coronavirus 2
  REGION 1..10: note = Table B: HLA-DPA1*03:01-B1*04:02L HLA-DPA1*03:01-B1*105:01L HLA-DPA1*01:02-B1*04:01L
LDYKAFKQIV

SEQ ID NO: 21087 - protein, 12 aa, Severe acute respiratory syndrome coronavirus 2
  REGION 1..12: note = Table B: HLA-DPA1*03:01-B1*04:02L HLA-DRB1*14:01L HLA-DRB1*12:01L HLA-DQA1*05:05-B1*03:01L HLA-DPA1*01:02-B1*04:01L
GAWNIGEQKSIL

SEQ ID NO: 21088 - protein, 15 aa, Severe acute respiratory syndrome coronavirus 2
  REGION 1..15: note = Table B: HLA-DPA1*03:01-B1*04:02L
TNNLVVMAYITGGVV

SEQ ID NO: 21089 - protein, 11 aa, Severe acute respiratory syndrome coronavirus 2
  REGION 1..11: note = Table B: HLA-DPA1*03:01-B1*04:02L
SQWLTNIFGTV

SEQ ID NO: 21090 - protein, 10 aa, Severe acute respiratory syndrome coronavirus 2
  REGION 1..10: note = Table B: HLA-DPA1*03:01-B1*04:02L HLA-DQA1*01-B1*05L HLA-DPA1*03:01-B1*105:01L HLA-DQA1*03:01-B1*03:02L HLA-DPA1*01:02-B1*04:01L HLA-DRB1*16:01L HLA-DQA1*02:01-B1*03:03L HLA-DRB1*15:03L
VYEKLKPVLD

SEQ ID NO: 21091 - protein, 12 aa, Severe acute respiratory syndrome coronavirus 2
  REGION 1..12: note = Table B: HLA-DPA1*03:01-B1*04:02L HLA-DPA1*03:01-B1*105:01L
VLDWLEEKFKEG

SEQ ID NO: 21092 - protein, 11 aa, Severe acute respiratory syndrome coronavirus 2
  REGION 1..11: note = Table B: HLA-DPA1*03:01-B1*04:02L HLA-DQA1*01-B1*05L
VEFLRDGWEIV

SEQ ID NO: 21093 - protein, 13 aa, Severe acute respiratory syndrome coronavirus 2
  REGION 1..13: note = Table B: HLA-DPA1*03:01-B1*04:02L HLA-DQA1*05:05-B1*03:01L HLA-DQA1*01:03-B1*06:01L
VKFISTCACEIVG

SEQ ID NO: 21094 - protein, 12 aa, Severe acute respiratory syndrome coronavirus 2
  REGION 1..12: note = Table B: HLA-DPA1*03:01-B1*04:02L
SVQTFFKLVNKF

SEQ ID NO: 21095 - protein, 11 aa, Severe acute respiratory syndrome coronavirus 2
  REGION 1..11: note = Table B: HLA-DPA1*03:01-B1*04:02L HLA-DQA1*05:05-B1*03:19L HLA-DPA1*01:03-B1*104:01L HLA-DRB1*16:01L
GETFVTHSKGL

SEQ ID NO: 21096 - protein, 18 aa, Severe acute respiratory syndrome coronavirus 2
  REGION 1..18: note = Table B: HLA-DPA1*03:01-B1*04:02L HLA-DRB1*03:01L HLA-DRB1*11:02L HLA-DPA1*01:03-B1*04:02L HLA-DPA1*01:02-B1*04:01L
PNMMVTNNTFTLKGGAPT

SEQ ID NO: 21097 - protein, 13 aa, Severe acute respiratory syndrome coronavirus 2
  REGION 1..13: note = Table B: HLA-DPA1*03:01-B1*04:02L
DDTVIEVQGYKSV

SEQ ID NO: 21098 - protein, 15 aa, Severe acute respiratory syndrome coronavirus 2
  REGION 1..15: note = Table B: HLA-DPA1*03:01-B1*04:02L HLA-DPA1*01:03-B1*04:02L
TPLGIDLDEWSMATY

SEQ ID NO: 21099 - protein, 13 aa, Severe acute respiratory syndrome coronavirus 2
  REGION 1..13: note = Table B: HLA-DPA1*03:01-B1*04:02L HLA-DPA1*03:01-B1*105:01L
LDEWSMATYYLFD

SEQ ID NO: 21100 - protein, 14 aa, Severe acute respiratory syndrome coronavirus 2
  REGION 1..14: note = Table B: HLA-DPA1*03:01-B1*04:02L HLA-DPA1*03:01-B1*105:01L HLA-DPA1*01:02-B1*04:01L
FKLASHMYCSFYPP

SEQ ID NO: 21101 - protein, 11 aa, Severe acute respiratory syndrome coronavirus 2
  REGION 1..11: note = Table B: HLA-DPA1*03:01-B1*04:02L HLA-DRB1*14:01L HLA-DPA1*03:01-B1*105:01L HLA-DRB1*15:03L
TIVEVQPQLEM

SEQ ID NO: 21102 - protein, 11 aa, Severe acute respiratory syndrome coronavirus 2
  REGION 1..11: note = Table B: HLA-DPA1*03:01-B1*04:02L HLA-DQA1*05:01-B1*02:01L HLA-DRB1*12:01L HLA-DPA1*03:01-B1*105:01L HLA-DRB1*15:03L
IQLLKSAYENF

SEQ ID NO: 21103 - protein, 12 aa, Severe acute respiratory syndrome coronavirus 2
  REGION 1..12: note = Table B: HLA-DPA1*03:01-B1*04:02L HLA-DRB1*14:01L HLA-DPA1*03:01-B1*105:01L
NFNQHEVLLAPL

SEQ ID NO: 21104 - protein, 10 aa, Severe acute respiratory syndrome coronavirus 2
  REGION 1..10: note = Table B: HLA-DPA1*03:01-B1*04:02L HLA-DPA1*03:01-B1*105:01L HLA-DPA1*01:02-B1*04:01L
LVSSFLEMKS

SEQ ID NO: 21105 - protein, 10 aa, Severe acute respiratory syndrome coronavirus 2
  REGION 1..10: note = Table B: HLA-DPA1*03:01-B1*04:02L HLA-DPA1*01:03-B1*04:01L HLA-DPA1*03:01-B1*105:01L HLA-DPA1*01:02-B1*04:01L
TLEETKFLTE

SEQ ID NO: 21106 - protein, 13 aa, Severe acute respiratory syndrome coronavirus 2
  REGION 1..13: note = Table B: HLA-DPA1*03:01-B1*04:02L HLA-DRB1*12:01L HLA-DRB1*15:03L
LGTVSWNLREMLA

SEQ ID NO: 21107 - protein, 14 aa, Severe acute respiratory syndrome coronavirus 2
  REGION 1..14: note = Table B: HLA-DPA1*03:01-B1*04:02L HLA-DRB1*03:01L HLA-DRB1*11:02L HLA-DRB1*11:03L HLA-DRB1*14:02L HLA-DQA1*05:05-B1*03:116L HLA-DPA1*01:03-B1*02:01L HLA-DRB1*08:02L
ARYMRSLKVPATVS

SEQ ID NO: 21108 - protein, 19 aa, Severe acute respiratory syndrome coronavirus 2
  REGION 1..19: note = Table B: HLA-DPA1*03:01-B1*04:02L
IKPHNSHEGKTFYVLPNDD

SEQ ID NO: 21109 - protein, 12 aa, Severe acute respiratory syndrome coronavirus 2
  REGION 1..12: note = Table B: HLA-DPA1*03:01-B1*04:02L HLA-DPA1*03:01-B1*105:01L
RVEAFEYYHTTD

SEQ ID NO: 21110 - protein, 15 aa, Severe acute respiratory syndrome coronavirus 2
  REGION 1..15: note = Table B: HLA-DPA1*03:01-B1*04:02L HLA-DRB1*11:02L HLA-DPA1*03:01-B1*105:01L
SALNHTKKWKYPQVN

SEQ ID NO: 21111 - protein, 12 aa, Severe acute respiratory syndrome coronavirus 2
  REGION 1..12: note = Table B: HLA-DPA1*03:01-B1*04:02L HLA-DRB1*12:01L HLA-DRB1*16:01L
LTSIKWADNNCY

SEQ ID NO: 21112 - protein, 13 aa, Severe acute respiratory syndrome coronavirus 2
  REGION 1..13: note = Table B: HLA-DPA1*03:01-B1*04:02L
DNNCYLATALLTL

SEQ ID NO: 21113 - protein, 10 aa, Severe acute respiratory syndrome coronavirus 2
  REGION 1..10: note = Table B: HLA-DPA1*03:01-B1*04:02L HLA-DPA1*03:01-B1*105:01L HLA-DPA1*01:02-B1*04:01L HLA-DQA1*01:03-B1*06:01L
YLATALLTLQ

SEQ ID NO: 21114 - protein, 12 aa, Severe acute respiratory syndrome coronavirus 2
  REGION 1..12: note = Table B: HLA-DPA1*03:01-B1*04:02L HLA-DQA1*05:01-B1*02:01L HLA-DRB1*12:01L
VMYMGTLSYEQF

SEQ ID NO: 21115 - protein, 11 aa, Severe acute respiratory syndrome coronavirus 2
  REGION 1..11: note = Table B: HLA-DPA1*03:01-B1*04:02L HLA-DPA1*03:01-B1*105:01L HLA-DRB1*16:01L HLA-DRB1*04:08L
NYQCGHYKHIT

SEQ ID NO: 21116 - protein, 16 aa, Severe acute respiratory syndrome coronavirus 2
  REGION 1..16: note = Table B: HLA-DPA1*03:01-B1*04:02L
KHITSKETLYCIDGAL

SEQ ID NO: 21117 - protein, 17 aa, Severe acute respiratory syndrome coronavirus 2
  REGION 1..17: note = Table B: HLA-DPA1*03:01-B1*04:02L
SKETLYCIDGALLTKSS

SEQ ID NO: 21118 - protein, 13 aa, Severe acute respiratory syndrome coronavirus 2
  REGION 1..13: note = Table B: HLA-DPA1*03:01-B1*04:02L HLA-DRB1*15:03L
GPITDVFYKENSY

SEQ ID NO: 21119 - protein, 15 aa, Severe acute respiratory syndrome coronavirus 2
  REGION 1..15: note = Table B: HLA-DPA1*03:01-B1*04:02L
LNQLTGYKKPASREL

SEQ ID NO: 21120 - protein, 10 aa, Severe acute respiratory syndrome coronavirus 2
  REGION 1..10: note = Table B: HLA-DPA1*03:01-B1*04:02L HLA-DPA1*03:01-B1*105:01L HLA-DPA1*01:02-B1*04:01L
ELKVTFFPDL

SEQ ID NO: 21121 - protein, 10 aa, Severe acute respiratory syndrome coronavirus 2
  REGION 1..10: note = Table B: HLA-DPA1*03:01-B1*04:02L HLA-DQA1*01-B1*05L HLA-DPA1*01:03-B1*04:01L HLA-DPA1*03:01-B1*105:01L HLA-DPA1*01:02-B1*04:01L HLA-DQA1*01:03-B1*06:01L
LKVTFFPDLN

SEQ ID NO: 21122 - protein, 12 aa, Severe acute respiratory syndrome coronavirus 2
  REGION 1..12: note = Table B: HLA-DPA1*03:01-B1*04:02L HLA-DPA1*03:01-B1*105:01L HLA-DRB1*15:03L
VAIDYKHYTPSF

SEQ ID NO: 21123 - protein, 17 aa, Severe acute respiratory syndrome coronavirus 2
  REGION 1..17: note = Table B: HLA-DPA1*03:01-B1*04:02L HLA-DPA1*01:03-B1*104:01L HLA-DPA1*01:02-B1*04:01L
KPVETSNSFDVLKSEDA

SEQ ID NO: 21124 - protein, 11 aa, Severe acute respiratory syndrome coronavirus 2
  REGION 1..11: note = Table B: HLA-DPA1*03:01-B1*04:02L HLA-DPA1*01:03-B1*04:01L HLA-DPA1*02:01-B1*13:01L
VVENPTIQKDV

SEQ ID NO: 21125 - protein, 12 aa, Severe acute respiratory syndrome coronavirus 2
  REGION 1..12: note = Table B: HLA-DPA1*03:01-B1*04:02L HLA-DQA1*01-B1*05L HLA-DQA1*05:01-B1*02:01L HLA-DPA1*01:03-B1*04:01L HLA-DPA1*01:03-B1*04:02L HLA-DPA1*01:02-B1*04:01L HLA-DRB1*16:01L
AAVNSVPWDTIA

SEQ ID NO: 21126 - protein, 12 aa, Severe acute respiratory syndrome coronavirus 2
  REGION 1..12: note = Table B: HLA-DPA1*03:01-B1*04:02L HLA-DRB1*12:01L
VNSVPWDTIANY

SEQ ID NO: 21127 - protein, 11 aa, Severe acute respiratory syndrome coronavirus 2
  REGION 1..11: note = Table B: HLA-DPA1*03:01-B1*04:02L
TNYMPYFFTLL

SEQ ID NO: 21128 - protein, 11 aa, Severe acute respiratory syndrome coronavirus 2
  REGION 1..11: note = Table B: HLA-DPA1*03:01-B1*04:02L HLA-DPA1*03:01-B1*105:01L
MPYFFTLLLQL

SEQ ID NO: 21129 - protein, 11 aa, Severe acute respiratory syndrome coronavirus 2
  REGION 1..11: note = Table B: HLA-DPA1*03:01-B1*04:02L
TFTRSTNSRIK

SEQ ID NO: 21130 - protein, 13 aa, Severe acute respiratory syndrome coronavirus 2
  REGION 1..13: note = Table B: HLA-DPA1*03:01-B1*04:02L
VGKFCLEASFNYL

SEQ ID NO: 21131 - protein, 11 aa, Severe acute respiratory syndrome coronavirus 2
  REGION 1..11: note = Table B: HLA-DPA1*03:01-B1*04:02L HLA-DQA1*01-B1*05L HLA-DPA1*03:01-B1*105:01L HLA-DQA1*01:03-B1*06:01L
ITISSFKWDLT

SEQ ID NO: 21132 - protein, 11 aa, Severe acute respiratory syndrome coronavirus 2
  REGION 1..11: note = Table B: HLA-DPA1*03:01-B1*04:02L HLA-DPA1*03:01-B1*105:01L HLA-DPA1*01:02-B1*04:01L
FKWDLTAFGLV

SEQ ID NO: 21133 - protein, 11 aa, Severe acute respiratory syndrome coronavirus 2
  REGION 1..11: note = Table B: HLA-DPA1*03:01-B1*04:02L HLA-DPA1*01:03-B1*04:01L HLA-DPA1*01:03-B1*04:02L HLA-DPA1*03:01-B1*105:01L HLA-DPA1*01:02-B1*04:01L HLA-DRB1*16:01L
KWDLTAFGLVA

SEQ ID NO: 21134 - protein, 11 aa, Severe acute respiratory syndrome coronavirus 2
  REGION 1..11: note = Table B: HLA-DPA1*03:01-B1*04:02L HLA-DPA1*03:01-B1*105:01L HLA-DPA1*01:02-B1*04:01L HLA-DQA1*01:03-B1*06:01L
WDLTAFGLVAE

SEQ ID NO: 21135 - protein, 10 aa, Severe acute respiratory syndrome coronavirus 2
  REGION 1..10: note = Table B: HLA-DPA1*03:01-B1*04:02L HLA-DPA1*03:01-B1*105:01L HLA-DPA1*01:02-B1*04:01L
WFLAYILFTR

SEQ ID NO: 21136 - protein, 10 aa, Severe acute respiratory syndrome coronavirus 2
  REGION 1..10: note = Table B: HLA-DPA1*03:01-B1*04:02L HLA-DPA1*02:01-B1*13:01L HLA-DPA1*03:01-B1*105:01L HLA-DPA1*01:02-B1*04:01L HLA-DQA1*01:03-B1*06:01L HLA-DRB1*15:03L
ILFTRFFYVL

SEQ ID NO: 21137 - protein, 12 aa, Severe acute respiratory syndrome coronavirus 2
  REGION 1..12: note = Table B: HLA-DPA1*03:01-B1*04:02L HLA-DPA1*03:01-B1*105:01L HLA-DRB1*15:03L
IMQLFFSYFAVH

SEQ ID NO: 21138 - protein, 10 aa, Severe acute respiratory syndrome coronavirus 2
  REGION 1..10: note = Table B: HLA-DPA1*03:01-B1*04:02L HLA-DPA1*03:01-B1*105:01L HLA-DPA1*01:02-B1*04:01L
YFAVHFISNS

SEQ ID NO: 21139 - protein, 11 aa, Severe acute respiratory syndrome coronavirus 2
  REGION 1..11: note = Table B: HLA-DPA1*03:01-B1*04:02L
VHFISNSWLMW

SEQ ID NO: 21140 - protein, 10 aa, Severe acute respiratory syndrome coronavirus 2
  REGION 1..10: note = Table B: HLA-DPA1*03:01-B1*04:02L
FISNSWLMWL

SEQ ID NO: 21141 - protein, 11 aa, Severe acute respiratory syndrome coronavirus 2
  REGION 1..11: note = Table B: HLA-DPA1*03:01-B1*04:02L HLA-DPA1*01:03-B1*04:02L
IFFASFYYVWK

SEQ ID NO: 21142 - protein, 10 aa, Severe acute respiratory syndrome coronavirus 2
  REGION 1..10: note = Table B: HLA-DPA1*03:01-B1*04:02L HLA-DPA1*01:03-B1*04:01L HLA-DPA1*03:01-B1*105:01L HLA-DPA1*01:02-B1*04:01L HLA-DRB1*16:01L HLA-DQA1*01:03-B1*06:01L
YVWKSYVHVV

SEQ ID NO: 21143 - protein, 16 aa, Severe acute respiratory syndrome coronavirus 2
  REGION 1..16: note = Table B: HLA-DPA1*03:01-B1*04:02L
YERHSLSHFVNLDNLR

SEQ ID NO: 21144 - protein, 15 aa, Severe acute respiratory syndrome coronavirus 2
  REGION 1..15: note = Table B: HLA-DPA1*03:01-B1*04:02L HLA-DRB1*11:01L
LPINVIVFDGKSKCE

SEQ ID NO: 21145 - protein, 13 aa, Severe acute respiratory syndrome coronavirus 2
  REGION 1..13: note = Table B: HLA-DPA1*03:01-B1*04:02L HLA-DPA1*03:01-B1*105:01L
YSQLMCQPILLLD

SEQ ID NO: 21146 - protein, 13 aa, Severe acute respiratory syndrome coronavirus 2
  REGION 1..13: note = Table B: HLA-DPA1*03:01-B1*04:02L HLA-DPA1*01:02-B1*04:01L HLA-DQA1*01:03-B1*06:01L
SQLMCQPILLLDQ

SEQ ID NO: 21147 - protein, 11 aa, Severe acute respiratory syndrome coronavirus 2
  REGION 1..11: note = Table B: HLA-DPA1*03:01-B1*04:02L HLA-DRB1*14:01L HLA-DRB1*12:01L
STFISAARQGF

SEQ ID NO: 21148 - protein, 13 aa, Severe acute respiratory syndrome coronavirus 2
  REGION 1..13: note = Table B: HLA-DPA1*03:01-B1*04:02L
SAARQGFVDSDVE

SEQ ID NO: 21149 - protein, 12 aa, Severe acute respiratory syndrome coronavirus 2
  REGION 1..12: note = Table B: HLA-DPA1*03:01-B1*04:02L HLA-DPA1*03:01-B1*105:01L HLA-DRB1*15:03L
YMLTYNKVENMT

SEQ ID NO: 21150 - protein, 10 aa, Severe acute respiratory syndrome coronavirus 2
  REGION 1..10: note = Table B: HLA-DPA1*03:01-B1*04:02L HLA-DPA1*01:02-B1*04:01L
WNVKDFMSLS

SEQ ID NO: 21151 - protein, 12 aa, Severe acute respiratory syndrome coronavirus 2
  REGION 1..12: note = Table B: HLA-DPA1*03:01-B1*04:02L HLA-DRB1*14:01L HLA-DRB1*12:01L HLA-DRB1*16:01L
GGKIVNNWLKQL

SEQ ID NO: 21152 - protein, 14 aa, Severe acute respiratory syndrome coronavirus 2
  REGION 1..14: note = Table B: HLA-DPA1*03:01-B1*04:02L
VITREVGFVVPGLP

SEQ ID NO: 21153 - protein, 13 aa, Severe acute respiratory syndrome coronavirus 2
  REGION 1..13: note = Table B: HLA-DPA1*03:01-B1*04:02L HLA-DRB1*12:01L HLA-DQA1*03:01-B1*03:02L
TNGDFLHFLPRVF

SEQ ID NO: 21154 - protein, 12 aa, Severe acute respiratory syndrome coronavirus 2
  REGION 1..12: note = Table B: HLA-DPA1*03:01-B1*04:02L HLA-DPA1*03:01-B1*105:01L
FLPRVFSAVGNI

SEQ ID NO: 21155 - protein, 11 aa, Severe acute respiratory syndrome coronavirus 2
  REGION 1..11: note = Table B: HLA-DPA1*03:01-B1*04:02L HLA-DPA1*01:02-B1*04:01L
NICYTPSKLIE

SEQ ID NO: 21156 - protein, 12 aa, Severe acute respiratory syndrome coronavirus 2
  REGION 1..12: note = Table B: HLA-DPA1*03:01-B1*04:02L
ICYTPSKLIEYT

SEQ ID NO: 21157 - protein, 12 aa, Severe acute respiratory syndrome coronavirus 2
  REGION 1..12: note = Table B: HLA-DPA1*03:01-B1*04:02L HLA-DQA1*01:01-B1*05:01L HLA-DRB1*08:01L HLA-DPA1*01:03-B1*04:02L HLA-DRB1*12:01L HLA-DQA1*05:05-B1*03:01L HLA-DRB1*04:08L
GSVAYESLRPDT

SEQ ID NO: 21158 - protein, 13 aa, Severe acute respiratory syndrome coronavirus 2
  REGION 1..13: note = Table B: HLA-DPA1*03:01-B1*04:02L HLA-DPA1*03:01-B1*105:01L HLA-DPA1*01:02-B1*04:01L HLA-DRB1*04:08L HLA-DRB1*15:03L
GRWVLNNDYYRSL

SEQ ID NO: 21159 - protein, 12 aa, Severe acute respiratory syndrome coronavirus 2
  REGION 1..12: note = Table B: HLA-DPA1*03:01-B1*04:02L HLA-DPA1*01:03-B1*04:01L HLA-DPA1*01:03-B1*04:02L HLA-DPA1*03:01-B1*105:01L HLA-DPA1*01:02-B1*04:01L HLA-DRB1*16:01L HLA-DQA1*01:03-B1*06:01L HLA-DRB1*15:03L
WVLNNDYYRSLP

SEQ ID NO: 21160 - protein, 12 aa, Severe acute respiratory syndrome coronavirus 2
  REGION 1..12: note = Table B: HLA-DPA1*03:01-B1*04:02L HLA-DPA1*03:01-B1*105:01L HLA-DPA1*01:02-B1*04:01L HLA-DQA1*01:03-B1*06:01L
LLTNMFTPLIQP

SEQ ID NO: 21161 - protein, 12 aa, Severe acute respiratory syndrome coronavirus 2
  REGION 1..12: note = Table B: HLA-DPA1*03:01-B1*04:02L HLA-DPA1*03:01-B1*105:01L
VVAFNTLLFLMS

SEQ ID NO: 21162 - protein, 13 aa, Severe acute respiratory syndrome coronavirus 2
  REGION 1..13: note = Table B: HLA-DPA1*03:01-B1*04:02L
LMSFTVLCLTPVY

SEQ ID NO: 21163 - protein, 13 aa, Severe acute respiratory syndrome coronavirus 2
  REGION 1..13: note = Table B: HLA-DPA1*03:01-B1*04:02L HLA-DPA1*01:03-B1*04:01L HLA-DPA1*01:03-B1*04:02L HLA-DPA1*01:02-B1*04:01L
LPGVYSVIYLYLT

SEQ ID NO: 21164 - protein, 12 aa, Severe acute respiratory syndrome coronavirus 2
  REGION 1..12: note = Table B: HLA-DPA1*03:01-B1*04:02L HLA-DPA1*03:01-B1*105:01L
AHIQWMVMFTPL

SEQ ID NO: 21165 - protein, 13 aa, Severe acute respiratory syndrome coronavirus 2
  REGION 1..13: note = Table B: HLA-DPA1*03:01-B1*04:02L HLA-DRB1*15:03L
HIQWMVMFTPLVP

SEQ ID NO: 21166 - protein, 11 aa, Severe acute respiratory syndrome coronavirus 2
  REGION 1..11: note = Table B: HLA-DPA1*03:01-B1*04:02L HLA-DPA1*03:01-B1*105:01L HLA-DRB1*15:03L
WMVMFTPLVPF

SEQ ID NO: 21167 - protein, 12 aa, Severe acute respiratory syndrome coronavirus 2
  REGION 1..12: note = Table B: HLA-DPA1*03:01-B1*04:02L HLA-DQA1*01-B1*05L HLA-DRB1*15:03L
TKHFYWFFSNYL

SEQ ID NO: 21168 - protein, 11 aa, Severe acute respiratory syndrome coronavirus 2
  REGION 1..11: note = Table B: HLA-DPA1*03:01-B1*04:02L
VFNGVSFSTFE

SEQ ID NO: 21169 - protein, 11 aa, Severe acute respiratory syndrome coronavirus 2
  REGION 1..11: note = Table B: HLA-DPA1*03:01-B1*04:02L HLA-DQA1*01-B1*05L HLA-DPA1*01:03-B1*04:01L HLA-DPA1*03:01-B1*105:01L HLA-DPA1*01:02-B1*04:01L HLA-DQA1*01:03-B1*06:01L
NGVSFSTFEEA

SEQ ID NO: 21170 - protein, 10 aa, Severe acute respiratory syndrome coronavirus 2
  REGION 1..10: note = Table B: HLA-DPA1*03:01-B1*04:02L HLA-DPA1*01:02-B1*04:01L
LLNKEMYLKL

SEQ ID NO: 21171 - protein, 12 aa, Severe acute respiratory syndrome coronavirus 2
  REGION 1..12: note = Table B: HLA-DPA1*03:01-B1*04:02L HLA-DPA1*03:01-B1*105:01L HLA-DRB1*16:01L HLA-DRB1*15:03L
YLKLRSDVLLPL

SEQ ID NO: 21172 - protein, 12 aa, Severe acute respiratory syndrome coronavirus 2
  REGION 1..12: note = Table B: HLA-DPA1*03:01-B1*04:02L HLA-DRB1*16:01L HLA-DQA1*01:03-B1*06:01L HLA-DRB1*04:08L
LKLRSDVLLPLT

SEQ ID NO: 21173 - protein, 16 aa, Severe acute respiratory syndrome coronavirus 2
  REGION 1..16: note = Table B: HLA-DPA1*03:01-B1*04:02L HLA-DRB1*14:02L HLA-DQA1*05:05-B1*03:01L
DTTSYREAACCHLAKA

SEQ ID NO: 21174 - protein, 12 aa, Severe acute respiratory syndrome coronavirus 2
  REGION 1..12: note = Table B: HLA-DPA1*03:01-B1*04:02L HLA-DPA1*02:01-B1*13:01L
MLNPNYEDLLIR

SEQ ID NO: 21175 - protein, 16 aa, Severe acute respiratory syndrome coronavirus 2
  REGION 1..16: note = Table B: HLA-DPA1*03:01-B1*04:02L HLA-DQA1*05:05-B1*03:19L
YEDLLIRKSNHNFLVQ

SEQ ID NO: 21176 - protein, 15 aa, Severe acute respiratory syndrome coronavirus 2
  REGION 1..15: note = Table B: HLA-DPA1*03:01-B1*04:02L HLA-DRB1*11:02L HLA-DRB4*02:01NL HLA-DRB4*01:01L HLA-DRB1*09:01L HLA-DRB1*07:01L HLA-DRB1*15:01L
VLKLKVDTANPKTPK

SEQ ID NO: 21177 - protein, 18 aa, Severe acute respiratory syndrome coronavirus 2
  REGION 1..18: note = Table B: HLA-DPA1*03:01-B1*04:02L
IQPGQTFSVLACYNGSPS

SEQ ID NO: 21178 - protein, 11 aa, Severe acute respiratory syndrome coronavirus 2
  REGION 1..11: note = Table B: HLA-DPA1*03:01-B1*04:02L HLA-DPA1*03:01-B1*105:01L
IDYDCVSFCYM

SEQ ID NO: 21179 - protein, 14 aa, Severe acute respiratory syndrome coronavirus 2
  REGION 1..14: note = Table B: HLA-DPA1*03:01-B1*04:02L HLA-DPA1*01:03-B1*04:02L HLA-DPA1*02:01-B1*13:01L HLA-DPA1*01:02-B1*04:01L HLA-DRB1*16:01L HLA-DQA1*02:01-B1*03:03L HLA-DRB1*15:03L
GTDLEGNFYGPFVD

SEQ ID NO: 21180 - protein, 13 aa, Severe acute respiratory syndrome coronavirus 2
  REGION 1..13: note = Table B: HLA-DPA1*03:01-B1*04:02L
NRFTTTLNDFNLV

SEQ ID NO: 21181 - protein, 14 aa, Severe acute respiratory syndrome coronavirus 2
  REGION 1..14: note = Table B: HLA-DPA1*03:01-B1*04:02L HLA-DRB1*11:01L HLA-DQA1*05:05-B1*03:116L HLA-DPA1*01:03-B1*04:02L HLA-DPA1*02:01-B1*13:01L HLA-DPA1*01:03-B1*104:01L
GPLSAQTGIAVLDM

SEQ ID NO: 21182 - protein, 13 aa, Severe acute respiratory syndrome coronavirus 2
  REGION 1..13: note = Table B: HLA-DPA1*03:01-B1*04:02L HLA-DPA1*01:02-B1*04:01L HLA-DQA1*01:03-B1*06:01L
NGRTILGSALLED

SEQ ID NO: 21183 - protein, 12 aa, Severe acute respiratory syndrome coronavirus 2
  REGION 1..12: note = Table B: HLA-DPA1*03:01-B1*04:02L HLA-DQA1*05:05-B1*03:19L HLA-DQA1*05:05-B1*03:01L HLA-DRB1*15:03L
TILGSALLEDEF

SEQ ID NO: 21184 - protein, 12 aa, Severe acute respiratory syndrome coronavirus 2
  REGION 1..12: note = Table B: HLA-DPA1*03:01-B1*04:02L HLA-DPA1*01:03-B1*04:01L HLA-DPA1*01:02-B1*04:01L HLA-DQA1*01:03-B1*06:01L
GSALLEDEFTPF

SEQ ID NO: 21185 - protein, 12 aa, Severe acute respiratory syndrome coronavirus 2
  REGION 1..12: note = Table B: HLA-DPA1*03:01-B1*04:02L HLA-DPA1*03:01-B1*105:01L
LLEDEFTPFDVV

SEQ ID NO: 21186 - protein, 13 aa, Severe acute respiratory syndrome coronavirus 2
  REGION 1..13: note = Table B: HLA-DPA1*03:01-B1*04:02L HLA-DPA1*03:01-B1*105:01L
THHWLLLTILTSL

SEQ ID NO: 21187 - protein, 14 aa, Severe acute respiratory syndrome coronavirus 2
  REGION 1..14: note = Table B: HLA-DPA1*03:01-B1*04:02L HLA-DPA1*01:03-B1*04:02L
TILTSLLVLVQSTQ

SEQ ID NO: 21188 - protein, 12 aa, Severe acute respiratory syndrome coronavirus 2
  REGION 1..12: note = Table B: HLA-DPA1*03:01-B1*04:02L
TSLLVLVQSTQW

SEQ ID NO: 21189 - protein, 13 aa, Severe acute respiratory syndrome coronavirus 2
  REGION 1..13: note = Table B: HLA-DPA1*03:01-B1*04:02L
YENAFLPFAMGII

SEQ ID NO: 21190 - protein, 12 aa, Severe acute respiratory syndrome coronavirus 2
  REGION 1..12: note = Table B: HLA-DPA1*03:01-B1*04:02L
NAFLPFAMGIIA

SEQ ID NO: 21191 - protein, 15 aa, Severe acute respiratory syndrome coronavirus 2
  REGION 1..15: note = Table B: HLA-DPA1*03:01-B1*04:02L HLA-DRB1*14:02L
SAFAMMFVKHKHAFL

SEQ ID NO: 21192 - protein, 13 aa, Severe acute respiratory syndrome coronavirus 2
  REGION 1..13: note = Table B: HLA-DPA1*03:01-B1*04:02L
KHAFLCLFLLPSL

SEQ ID NO: 21193 - protein, 14 aa, Severe acute respiratory syndrome coronavirus 2
  REGION 1..14: note = Table B: HLA-DPA1*03:01-B1*04:02L HLA-DRB1*14:01L HLA-DRB1*12:01L
LATVAYFNMVYMPA

SEQ ID NO: 21194 - protein, 12 aa, Severe acute respiratory syndrome coronavirus 2
  REGION 1..12: note = Table B: HLA-DPA1*03:01-B1*04:02L HLA-DQA1*05:01-B1*02:01L
MPASWVMRIMTW

SEQ ID NO: 21195 - protein, 12 aa, Severe acute respiratory syndrome coronavirus 2
  REGION 1..12: note = Table B: HLA-DPA1*03:01-B1*04:02L HLA-DPA1*03:01-B1*105:01L
VMRIMTWLDMVD

SEQ ID NO: 21196 - protein, 12 aa, Severe acute respiratory syndrome coronavirus 2
  REGION 1..12: note = Table B: HLA-DPA1*03:01-B1*04:02L HLA-DRB1*12:01L HLA-DPA1*03:01-B1*105:01L HLA-DPA1*01:02-B1*04:01L HLA-DRB1*15:03L
VLTLVYKVYYGN

SEQ ID NO: 21197 - protein, 12 aa, Severe acute respiratory syndrome coronavirus 2
  REGION 1..12: note = Table B: HLA-DPA1*03:01-B1*04:02L HLA-DPA1*03:01-B1*105:01L
LTLVYKVYYGNA

SEQ ID NO: 21198 - protein, 12 aa, Severe acute respiratory syndrome coronavirus 2
  REGION 1..12: note = Table B: HLA-DPA1*03:01-B1*04:02L
KVYYGNALDQAI

SEQ ID NO: 21199 - protein, 12 aa, Severe acute respiratory syndrome coronavirus 2
  REGION 1..12: note = Table B: HLA-DPA1*03:01-B1*04:02L
GIVFMCVEYCPI

SEQ ID NO: 21200 - protein, 12 aa, Severe acute respiratory syndrome coronavirus 2
  REGION 1..12: note = Table B: HLA-DPA1*03:01-B1*04:02L HLA-DPA1*03:01-B1*105:01L
IVFMCVEYCPIF

SEQ ID NO: 21201 - protein, 18 aa, Severe acute respiratory syndrome coronavirus 2
  REGION 1..18: note = Table B: HLA-DPA1*03:01-B1*04:02L HLA-DRB1*14:02L HLA-DPA1*01:03-B1*04:02L
LPPKNSIDAFKLNIKLLG

SEQ ID NO: 21202 - protein, 15 aa, Severe acute respiratory syndrome coronavirus 2
  REGION 1..15: note = Table B: HLA-DPA1*03:01-B1*04:02L HLA-DQA1*05:05-B1*03:19L HLA-DPA1*01:03-B1*04:02L HLA-DQA1*02:01-B1*03:03L HLA-DRB1*15:03L
SKLWAQCVQLHNDIL

SEQ ID NO: 21203 - protein, 10 aa, Severe acute respiratory syndrome coronavirus 2
  REGION 1..10: note = Table B: HLA-DPA1*03:01-B1*04:02L HLA-DQA1*01-B1*05L HLA-DPA1*03:01-B1*105:01L HLA-DPA1*01:02-B1*04:01L HLA-DQA1*01:03-B1*06:01L
TTEAFEKMVS

SEQ ID NO: 21204 - protein, 13 aa, Severe acute respiratory syndrome coronavirus 2
  REGION 1..13: note = Table B: HLA-DPA1*03:01-B1*04:02L HLA-DPA1*01:02-B1*04:01L
QGAVDINKLCEEM

SEQ ID NO: 21205 - protein, 12 aa, Severe acute respiratory syndrome coronavirus 2
  REGION 1..12: note = Table B: HLA-DPA1*03:01-B1*04:02L HLA-DPA1*03:01-B1*105:01L HLA-DPA1*01:02-B1*04:01L HLA-DQA1*01:03-B1*06:01L
AIASEFSSLPSY

SEQ ID NO: 21206 - protein, 15 aa, Severe acute respiratory syndrome coronavirus 2
  REGION 1..15: note = Table B: HLA-DPA1*03:01-B1*04:02L
TAQEAYEQAVANGDS

SEQ ID NO: 21207 - protein, 15 aa, Severe acute respiratory syndrome coronavirus 2
  REGION 1..15: note = Table B: HLA-DPA1*03:01-B1*04:02L HLA-DRB1*03:01L
AQEAYEQAVANGDSE

SEQ ID NO: 21208 - protein, 16 aa, Severe acute respiratory syndrome coronavirus 2
  REGION 1..16: note = Table B: HLA-DPA1*03:01-B1*04:02L HLA-DQA1*05:05-B1*03:116L
QEAYEQAVANGDSEVV

SEQ ID NO: 21209 - protein, 16 aa, Severe acute respiratory syndrome coronavirus 2
  REGION 1..16: note = Table B: HLA-DPA1*03:01-B1*04:02L HLA-DRB1*14:02L HLA-DQA1*05:05-B1*03:19L HLA-DRB1*13:01L HLA-DPA1*01:03-B1*04:02L HLA-DPA1*01:03-B1*02:01L
DSEVVLKKLKKSLNVA

SEQ ID NO: 21210 - protein, 18 aa, Severe acute respiratory syndrome coronavirus 2
  REGION 1..18: note = Table B: HLA-DPA1*03:01-B1*04:02L HLA-DRB1*14:02L HLA-DQA1*05:05-B1*03:19L HLA-DPA1*01:03-B1*04:02L
SEVVLKKLKKSLNVAKSE

SEQ ID NO: 21211 - protein, 17 aa, Severe acute respiratory syndrome coronavirus 2
  REGION 1..17: note = Table B: HLA-DPA1*03:01-B1*04:02L HLA-DRB1*03:01L HLA-DRB1*09:01L HLA-DPA1*01:03-B1*04:02L HLA-DPA1*01:02-B1*04:01L
LKKSLNVAKSEFDRDAA

SEQ ID NO: 21212 - protein, 11 aa, Severe acute respiratory syndrome coronavirus 2
  REGION 1..11: note = Table B: HLA-DPA1*03:01-B1*04:02L
SAMQTMLFTML

SEQ ID NO: 21213 - protein, 11 aa, Severe acute respiratory syndrome coronavirus 2
  REGION 1..11: note = Table B: HLA-DPA1*03:01-B1*04:02L HLA-DPA1*01:03-B1*04:02L
AMQTMLFTMLR

SEQ ID NO: 21214 - protein, 10 aa, Severe acute respiratory syndrome coronavirus 2
  REGION 1..10: note = Table B: HLA-DPA1*03:01-B1*04:02L HLA-DPA1*01:02-B1*04:01L
TMLFTMLRKL

SEQ ID NO: 21215 - protein, 15 aa, Severe acute respiratory syndrome coronavirus 2
  REGION 1..15: note = Table B: HLA-DPA1*03:01-B1*04:02L HLA-DRB1*14:02L HLA-DRB1*11:01L HLA-DRB4*01:01L
DNDALNNIINNARDG

SEQ ID NO: 21216 - protein, 12 aa, Severe acute respiratory syndrome coronavirus 2
  REGION 1..12: note = Table B: HLA-DPA1*03:01-B1*04:02L HLA-DQA1*05:05-B1*03:19L HLA-DPA1*01:03-B1*04:02L HLA-DQA1*05:05-B1*03:01L
TFTYASALWEIQ

SEQ ID NO: 21217 - protein, 13 aa, Severe acute respiratory syndrome coronavirus 2
  REGION 1..13: note = Table B: HLA-DPA1*03:01-B1*04:02L HLA-DQA1*05:01-B1*02:01L HLA-DRB1*09:01L
IVTALRANSAVKL

SEQ ID NO: 21218 - protein, 11 aa, Severe acute respiratory syndrome coronavirus 2
  REGION 1..11: note = Table B: HLA-DPA1*03:01-B1*04:02L HLA-DPA1*03:01-B1*105:01L HLA-DPA1*01:02-B1*04:01L
RFVLALLSDLQ

SEQ ID NO: 21219 - protein, 13 aa, Severe acute respiratory syndrome coronavirus 2
  REGION 1..13: note = Table B: HLA-DPA1*03:01-B1*04:02L
FVLALLSDLQDLK

SEQ ID NO: 21220 - protein, 12 aa, Severe acute respiratory syndrome coronavirus 2
  REGION 1..12: note = Table B: HLA-DPA1*03:01-B1*04:02L HLA-DPA1*03:01-B1*105:01L HLA-DRB1*16:01L
SDLQDLKWARFP

SEQ ID NO: 21221 - protein, 13 aa, Severe acute respiratory syndrome coronavirus 2
  REGION 1..13: note = Table B: HLA-DPA1*03:01-B1*04:02L HLA-DPA1*03:01-B1*105:01L
DLQDLKWARFPKS

SEQ ID NO: 21222 - protein, 16 aa, Severe acute respiratory syndrome coronavirus 2
  REGION 1..16: note = Table B: HLA-DPA1*03:01-B1*04:02L
ATVRLQAGNATEVPAN

SEQ ID NO: 21223 - protein, 13 aa, Severe acute respiratory syndrome coronavirus 2
  REGION 1..13: note = Table B: HLA-DPA1*03:01-B1*04:02L
STDVVYRAFDIYN

SEQ ID NO: 21224 - protein, 14 aa, Severe acute respiratory syndrome coronavirus 2
  REGION 1..14: note = Table B: HLA-DPA1*03:01-B1*04:02L HLA-DRB1*11:02L HLA-DRB1*11:03L HLA-DRB1*14:02L HLA-DQA1*05:05-B1*03:19L HLA-DRB1*13:01L HLA-DPA1*01:03-B1*04:02L HLA-DPA1*03:01-B1*105:01L HLA-DRB1*08:02L
SYFVVKRHTFSNYQ

SEQ ID NO: 21225 - protein, 12 aa, Severe acute respiratory syndrome coronavirus 2
  REGION 1..12: note = Table B: HLA-DPA1*03:01-B1*04:02L HLA-DPA1*02:01-B1*13:01L
WYDFVENPDILR

SEQ ID NO: 21226 - protein, 12 aa, Severe acute respiratory syndrome coronavirus 2
  REGION 1..12: note = Table B: HLA-DPA1*03:01-B1*04:02L HLA-DQA1*05:01-B1*02:01L HLA-DPA1*03:01-B1*105:01L
GNWYDFGDFIQT

SEQ ID NO: 21227 - protein, 13 aa, Severe acute respiratory syndrome coronavirus 2
  REGION 1..13: note = Table B: HLA-DPA1*03:01-B1*04:02L HLA-DQA1*01:01-B1*05:01L HLA-DPA1*02:01-B1*13:01L
TPGSGVPVVDSYY

SEQ ID NO: 21228 - protein, 12 aa, Severe acute respiratory syndrome coronavirus 2
  REGION 1..12: note = Table B: HLA-DPA1*03:01-B1*04:02L
VDSYYSLLMPIL

SEQ ID NO: 21229 - protein, 13 aa, Severe acute respiratory syndrome coronavirus 2
  REGION 1..13: note = Table B: HLA-DPA1*03:01-B1*04:02L HLA-DPA1*01:02-B1*04:01L
PYIKWDLLKYDFT

SEQ ID NO: 21230 - protein, 14 aa, Severe acute respiratory syndrome coronavirus 2
  REGION 1..14: note = Table B: HLA-DPA1*03:01-B1*04:02L HLA-DRB1*15:03L
FVDGVPFVVSTGYH

SEQ ID NO: 21231 - protein, 13 aa, Severe acute respiratory syndrome coronavirus 2
  REGION 1..13: note = Table B: HLA-DPA1*03:01-B1*04:02L HLA-DPA1*01:02-B1*04:01L HLA-DRB1*16:01L HLA-DRB1*04:08L
SSRLSFKELLVYA

SEQ ID NO: 21232 - protein, 15 aa, Severe acute respiratory syndrome coronavirus 2
  REGION 1..15: note = Table B: HLA-DPA1*03:01-B1*04:02L HLA-DPA1*01:02-B1*04:01L
SRLSFKELLVYAADP

SEQ ID NO: 21233 - protein, 11 aa, Severe acute respiratory syndrome coronavirus 2
  REGION 1..11: note = Table B: HLA-DPA1*03:01-B1*04:02L
LLVYAADPAMH

SEQ ID NO: 21234 - protein, 15 aa, Severe acute respiratory syndrome coronavirus 2
  REGION 1..15: note = Table B: HLA-DPA1*03:01-B1*04:02L HLA-DRB1*11:02L HLA-DQA1*05:05-B1*03:19L HLA-DPA1*01:03-B1*04:02L
GNLLLDKRTTCFSVA

SEQ ID NO: 21235 - protein, 15 aa, Severe acute respiratory syndrome coronavirus 2
  REGION 1..15: note = Table B: HLA-DPA1*03:01-B1*04:02L HLA-DPA1*01:02-B1*04:01L
VAALTNNVAFQTVKP

SEQ ID NO: 21236 - protein, 13 aa, Severe acute respiratory syndrome coronavirus 2
  REGION 1..13: note = Table B: HLA-DPA1*03:01-B1*04:02L HLA-DRB1*08:01L HLA-DPA1*01:03-B1*04:01L HLA-DPA1*02:01-B1*13:01L HLA-DQA1*03:01-B1*03:02L HLA-DPA1*01:02-B1*04:01L HLA-DRB1*16:01L HLA-DRB1*04:08L HLA-DRB1*15:03L
KPGNFNKDFYDFA

SEQ ID NO: 21237 - protein, 12 aa, Severe acute respiratory syndrome coronavirus 2
  REGION 1..12: note = Table B: HLA-DPA1*03:01-B1*04:02L HLA-DQA1*05:01-B1*02:01L HLA-DPA1*03:01-B1*105:01L
NFNKDFYDFAVS

SEQ ID NO: 21238 - protein, 13 aa, Severe acute respiratory syndrome coronavirus 2
  REGION 1..13: note = Table B: HLA-DPA1*03:01-B1*04:02L HLA-DPA1*03:01-B1*105:01L
SDYDYYRYNLPTM

SEQ ID NO: 21239 - protein, 13 aa, Severe acute respiratory syndrome coronavirus 2
  REGION 1..13: note = Table B: HLA-DPA1*03:01-B1*04:02L
VVEVVDKYFDCYD

SEQ ID NO: 21240 - protein, 14 aa, Severe acute respiratory syndrome coronavirus 2
  REGION 1..14: note = Table B: HLA-DPA1*03:01-B1*04:02L HLA-DRB1*16:01L
VEVVDKYFDCYDGG

SEQ ID NO: 21241 - protein, 10 aa, Severe acute respiratory syndrome coronavirus 2
  REGION 1..10: note = Table B: HLA-DPA1*03:01-B1*04:02L HLA-DRB1*14:01L HLA-DPA1*01:02-B1*04:01L HLA-DRB1*16:01L
FAYTKRNVIP

SEQ ID NO: 21242 - protein, 12 aa, Severe acute respiratory syndrome coronavirus 2
  REGION 1..12: note = Table B: HLA-DPA1*03:01-B1*04:02L HLA-DRB1*14:01L
VIPTITQMNLKY

SEQ ID NO: 21243 - protein, 18 aa, Severe acute respiratory syndrome coronavirus 2
  REGION 1..18: note = Table B: HLA-DPA1*03:01-B1*04:02L
MNLKYAISAKNRARTVAG

SEQ ID NO: 21244 - protein, 14 aa, Severe acute respiratory syndrome coronavirus 2
  REGION 1..14: note = Table B: HLA-DPA1*03:01-B1*04:02L HLA-DQA1*01:01-B1*05:01L HLA-DRB1*08:01L HLA-DRB1*11:01L HLA-DPA1*01:03-B1*04:02L
IAATRGATVVIGTS

SEQ ID NO: 21245 - protein, 14 aa, Severe acute respiratory syndrome coronavirus 2
  REGION 1..14: note = Table B: HLA-DPA1*03:01-B1*04:02L HLA-DRB3*01:01L
NMLKTVYSDVENPH

SEQ ID NO: 21246 - protein, 13 aa, Severe acute respiratory syndrome coronavirus 2
  REGION 1..13: note = Table B: HLA-DPA1*03:01-B1*04:02L HLA-DPA1*03:01-B1*105:01L HLA-DRB1*15:03L
NPHLMGWDYPKCD

SEQ ID NO: 21247 - protein, 11 aa, Severe acute respiratory syndrome coronavirus 2
  REGION 1..11: note = Table B: HLA-DPA1*03:01-B1*04:02L HLA-DPA1*03:01-B1*105:01L
TAYANSVFNIC

SEQ ID NO: 21248 - protein, 10 aa, Severe acute respiratory syndrome coronavirus 2
  REGION 1..10: note = Table B: HLA-DPA1*03:01-B1*04:02L HLA-DPA1*03:01-B1*105:01L HLA-DPA1*01:02-B1*04:01L
YANSVFNICQ

SEQ ID NO: 21249 - protein, 16 aa, Severe acute respiratory syndrome coronavirus 2
  REGION 1..16: note = Table B: HLA-DPA1*03:01-B1*04:02L HLA-DPA1*03:01-B1*105:01L
HRLYECLYRNRDVDTD

SEQ ID NO: 21250 - protein, 10 aa, Severe acute respiratory syndrome coronavirus 2
  REGION 1..10: note = Table B: HLA-DPA1*03:01-B1*04:02L HLA-DPA1*03:01-B1*105:01L HLA-DPA1*01:02-B1*04:01L
DFVNEFYAYL

SEQ ID NO: 21251 - protein, 13 aa, Severe acute respiratory syndrome coronavirus 2
  REGION 1..13: note = Table B: HLA-DPA1*03:01-B1*04:02L HLA-DRB1*11:02L
EFYAYLRKHFSMM

SEQ ID NO: 21252 - protein, 15 aa, Severe acute respiratory syndrome coronavirus 2
  REGION 1..15: note = Table B: HLA-DPA1*03:01-B1*04:02L HLA-DPA1*01:03-B1*04:02L
LRKHFSMMILSDDAV

SEQ ID NO: 21253 - protein, 16 aa, Severe acute respiratory syndrome coronavirus 2
  REGION 1..16: note = Table B: HLA-DPA1*03:01-B1*04:02L HLA-DPA1*02:01-B1*13:01L
LVKQGDDYVYLPYPDP

SEQ ID NO: 21254 - protein, 20 aa, Severe acute respiratory syndrome coronavirus 2
  REGION 1..20: note = Table B: HLA-DPA1*03:01-B1*04:02L HLA-DRB1*14:02L HLA-DRB1*12:01L
PYPDPSRILGAGCFVDDIVK

SEQ ID NO: 21255 - protein, 13 aa, Severe acute respiratory syndrome coronavirus 2
  REGION 1..13: note = Table B: HLA-DPA1*03:01-B1*04:02L HLA-DPA1*01:03-B1*04:02L HLA-DPA1*01:02-B1*04:01L
FVSLAIDAYPLTK

SEQ ID NO: 21256 - protein, 16 aa, Severe acute respiratory syndrome coronavirus 2
  REGION 1..16: note = Table B: HLA-DPA1*03:01-B1*04:02L HLA-DPA1*01:03-B1*04:02L HLA-DPA1*03:01-B1*105:01L
FHLYLQYIRKLHDELT

SEQ ID NO: 21257 - protein, 15 aa, Severe acute respiratory syndrome coronavirus 2
  REGION 1..15: note = Table B: HLA-DPA1*03:01-B1*04:02L
FNAIATCDWTNAGDY

SEQ ID NO: 21258 - protein, 16 aa, Severe acute respiratory syndrome coronavirus 2
  REGION 1..16: note = Table B: HLA-DPA1*03:01-B1*04:02L HLA-DRB1*11:02L HLA-DPA1*01:03-B1*04:02L HLA-DRB1*08:02L
TEETFKLSYGIATVRE

SEQ ID NO: 21259 - protein, 11 aa, Severe acute respiratory syndrome coronavirus 2
  REGION 1..11: note = Table B: HLA-DPA1*03:01-B1*04:02L
LSYGIATVREV

SEQ ID NO: 21260 - protein, 10 aa, Severe acute respiratory syndrome coronavirus 2
  REGION 1..10: note = Table B: HLA-DPA1*03:01-B1*04:02L HLA-DQA1*01-B1*05L HLA-DPA1*03:01-B1*105:01L HLA-DPA1*01:02-B1*04:01L HLA-DRB1*16:01L
NYVFTGYRVT

SEQ ID NO: 21261 - protein, 13 aa, Severe acute respiratory syndrome coronavirus 2
  REGION 1..13: note = Table B: HLA-DPA1*03:01-B1*04:02L HLA-DPA1*02:01-B1*13:01L HLA-DQA1*01:03-B1*06:01L
YTFEKGDYGDAVV

SEQ ID NO: 21262 - protein, 12 aa, Severe acute respiratory syndrome coronavirus 2
  REGION 1..12: note = Table B: HLA-DPA1*03:01-B1*04:02L HLA-DPA1*03:01-B1*105:01L HLA-DRB1*15:03L
YKLNVGDYFVLT

SEQ ID NO: 21263 - protein, 12 aa, Severe acute respiratory syndrome coronavirus 2
  REGION 1..12: note = Table B: HLA-DPA1*03:01-B1*04:02L HLA-DPA1*01:03-B1*04:02L HLA-DPA1*03:01-B1*105:01L
LNVGDYFVLTSH

SEQ ID NO: 21264 - protein, 12 aa, Severe acute respiratory syndrome coronavirus 2
  REGION 1..12: note = Table B: HLA-DPA1*03:01-B1*04:02L HLA-DPA1*01:03-B1*04:02L HLA-DQA1*02:01-B1*03:03L
NVGDYFVLTSHT

SEQ ID NO: 21265 - protein, 11 aa, Severe acute respiratory syndrome coronavirus 2
  REGION 1..11: note = Table B: HLA-DPA1*03:01-B1*04:02L HLA-DRB1*15:03L
FSSNVANYQKV

SEQ ID NO: 21266 - protein, 13 aa, Severe acute respiratory syndrome coronavirus 2
  REGION 1..13: note = Table B: HLA-DPA1*03:01-B1*04:02L HLA-DPA1*01:03-B1*04:02L HLA-DPA1*01:02-B1*04:01L
HFAIGLALYYPSA

SEQ ID NO: 21267 - protein, 12 aa, Severe acute respiratory syndrome coronavirus 2
  REGION 1..12: note = Table B: HLA-DPA1*03:01-B1*04:02L HLA-DPA1*03:01-B1*105:01L
KALKYLPIDKCS

SEQ ID NO: 21268 - protein, 11 aa, Severe acute respiratory syndrome coronavirus 2
  REGION 1..11: note = Table B: HLA-DPA1*03:01-B1*04:02L HLA-DPA1*03:01-B1*105:01L HLA-DPA1*01:02-B1*04:01L
TLEQYVFCTVN

SEQ ID NO: 21269 - protein, 13 aa, Severe acute respiratory syndrome coronavirus 2
  REGION 1..13: note = Table B: HLA-DPA1*03:01-B1*04:02L HLA-DPA1*03:01-B1*105:01L
LEQYVFCTVNALP

SEQ ID NO: 21270 - protein, 12 aa, Severe acute respiratory syndrome coronavirus 2
  REGION 1..12: note = Table B: HLA-DPA1*03:01-B1*04:02L HLA-DRB1*14:01L HLA-DRB1*14:17L
TADIVVFDEISM

SEQ ID NO: 21271 - protein, 14 aa, Severe acute respiratory syndrome coronavirus 2
  REGION 1..14: note = Table B: HLA-DPA1*03:01-B1*04:02L HLA-DPA1*03:01-B1*105:01L
DEISMATNYDLSVV

SEQ ID NO: 21272 - protein, 12 aa, Severe acute respiratory syndrome coronavirus 2
  REGION 1..12: note = Table B: HLA-DPA1*03:01-B1*04:02L HLA-DRB1*12:01L HLA-DPA1*03:01-B1*105:01L HLA-DPA1*01:02-B1*04:01L HLA-DRB1*16:01L HLA-DRB1*15:03L
EPEYFNSVCRLM

SEQ ID NO: 21273 - protein, 11 aa, Severe acute respiratory syndrome coronavirus 2
  REGION 1..11: note = Table B: HLA-DPA1*03:01-B1*04:02L HLA-DPA1*01:02-B1*04:01L
KTIGPDMFLGT

SEQ ID NO: 21274 - protein, 11 aa, Severe acute respiratory syndrome coronavirus 2
  REGION 1..11: note = Table B: HLA-DPA1*03:01-B1*04:02L HLA-DRB1*14:01L HLA-DPA1*02:01-B1*13:01L HLA-DPA1*03:01-B1*105:01L HLA-DRB1*08:02L HLA-DQA1*02:01-B1*03:03L
EIVDTVSALVY

SEQ ID NO: 21275 - protein, 13 aa, Severe acute respiratory syndrome coronavirus 2
  REGION 1..13: note = Table B: HLA-DPA1*03:01-B1*04:02L HLA-DRB1*11:02L HLA-DQA1*05:05-B1*03:19L
ALVYDNKLKAHKD

SEQ ID NO: 21276 - protein, 13 aa, Severe acute respiratory syndrome coronavirus 2
  REGION 1..13: note = Table B: HLA-DPA1*03:01-B1*04:02L HLA-DPA1*02:01-B1*13:01L HLA-DPA1*01:03-B1*104:01L HLA-DPA1*01:02-B1*04:01L
SPYNSQNAVASKI

SEQ ID NO: 21277 - protein, 12 aa, Severe acute respiratory syndrome coronavirus 2
  REGION 1..12: note = Table B: HLA-DPA1*03:01-B1*04:02L HLA-DPA1*01:03-B1*04:02L HLA-DPA1*03:01-B1*105:01L HLA-DPA1*01:02-B1*04:01L
EYDYVIFTQTTE

SEQ ID NO: 21278 - protein, 14 aa, Severe acute respiratory syndrome coronavirus 2
  REGION 1..14: note = Table B: HLA-DPA1*03:01-B1*04:02L HLA-DPA1*01:03-B1*04:02L HLA-DPA1*03:01-B1*105:01L HLA-DRB1*04:08L
DTKFKTEGLCVDIP

SEQ ID NO: 21279 - protein, 12 aa, Severe acute respiratory syndrome coronavirus 2
  REGION 1..12: note = Table B: HLA-DPA1*03:01-B1*04:02L HLA-DPA1*03:01-B1*105:01L HLA-DPA1*01:02-B1*04:01L HLA-DQA1*01:03-B1*06:01L
FKTEGLCVDIPG

SEQ ID NO: 21280 - protein, 16 aa, Severe acute respiratory syndrome coronavirus 2
  REGION 1..16: note = Table B: HLA-DPA1*03:01-B1*04:02L HLA-DRB1*14:02L HLA-DPA1*01:03-B1*04:02L
RRLISMMGFKMNYQVN

SEQ ID NO: 21281 - protein, 12 aa, Severe acute respiratory syndrome coronavirus 2
  REGION 1..12: note = Table B: HLA-DPA1*03:01-B1*04:02L HLA-DQA1*05:01-B1*02:01L HLA-DRB1*12:01L HLA-DPA1*03:01-B1*105:01L HLA-DPA1*01:02-B1*04:01L HLA-DRB1*16:01L HLA-DQA1*01:03-B1*06:01L HLA-DRB1*15:03L
YPNMFITREEAI

SEQ ID NO: 21282 - protein, 12 aa, Severe acute respiratory syndrome coronavirus 2
  REGION 1..12: note = Table B: HLA-DPA1*03:01-B1*04:02L HLA-DPA1*03:01-B1*105:01L HLA-DPA1*01:02-B1*04:01L
KHLIPLMYKGLP

SEQ ID NO: 21283 - protein, 10 aa, Severe acute respiratory syndrome coronavirus 2
  REGION 1..10: note = Table B: HLA-DPA1*03:01-B1*04:02L HLA-DRB1*15:03L
VFVLWAHGFE

SEQ ID NO: 21284 - protein, 10 aa, Severe acute respiratory syndrome coronavirus 2
  REGION 1..10: note = Table B: HLA-DPA1*03:01-B1*04:02L HLA-DQA1*01-B1*05L HLA-DQA1*05:01-B1*02:01L HLA-DPA1*01:03-B1*04:01L HLA-DPA1*01:03-B1*04:02L HLA-DRB1*12:01L HLA-DPA1*03:01-B1*105:01L HLA-DPA1*01:02-B1*04:01L
  REGION 1..10: note = CONT. FROM ABOVE: HLA-DRB1*16:01L HLA-DQA1*01:03-B1*06:01L HLA-D QA1*02:01-B1*03:03L HLA-DRB1*15:03L
VLWAHGFELT

SEQ ID NO: 21285 - protein, 10 aa, Severe acute respiratory syndrome coronavirus 2
  REGION 1..10: note = Table B: HLA-DPA1*03:01-B1*04:02L HLA-DPA1*03:01-B1*105:01L HLA-DPA1*01:02-B1*04:01L
LWAHGFELTS

SEQ ID NO: 21286 - protein, 13 aa, Severe acute respiratory syndrome coronavirus 2
  REGION 1..13: note = Table B: HLA-DPA1*03:01-B1*04:02L
SMKYFVKIGPERT

SEQ ID NO: 21287 - protein, 10 aa, Severe acute respiratory syndrome coronavirus 2
  REGION 1..10: note = Table B: HLA-DPA1*03:01-B1*04:02L HLA-DQA1*01-B1*05L HLA-DPA1*03:01-B1*105:01L HLA-DPA1*01:02-B1*04:01L HLA-DQA1*01:03-B1*06:01L
DYVYNPFMID

SEQ ID NO: 21288 - protein, 10 aa, Severe acute respiratory syndrome coronavirus 2
  REGION 1..10: note = Table B: HLA-DPA1*03:01-B1*04:02L HLA-DQA1*01-B1*05L HLA-DPA1*03:01-B1*105:01L HLA-DPA1*01:02-B1*04:01L HLA-DQA1*01:03-B1*06:01L
VYNPFMIDVQ

SEQ ID NO: 21289 - protein, 12 aa, Severe acute respiratory syndrome coronavirus 2
  REGION 1..12: note = Table B: HLA-DPA1*03:01-B1*04:02L HLA-DPA1*02:01-B1*13:01L
FTGNLQSNHDLY

SEQ ID NO: 21290 - protein, 13 aa, Severe acute respiratory syndrome coronavirus 2
  REGION 1..13: note = Table B: HLA-DPA1*03:01-B1*04:02L HLA-DQA1*01-B1*05L HLA-DRB1*12:01L HLA-DRB1*16:01L HLA-DRB1*15:03L
VKRVDWTIEYPII

SEQ ID NO: 21291 - protein, 16 aa, Severe acute respiratory syndrome coronavirus 2
  REGION 1..16: note = Table B: HLA-DPA1*03:01-B1*04:02L HLA-DRB1*14:02L HLA-DPA1*01:03-B1*04:02L HLA-DPA1*01:03-B1*104:01L HLA-DQA1*05:05-B1*03:01L
VQHMVVKAALLADKFP

SEQ ID NO: 21292 - protein, 12 aa, Severe acute respiratory syndrome coronavirus 2
  REGION 1..12: note = Table B: HLA-DPA1*03:01-B1*04:02L HLA-DQA1*01-B1*05L HLA-DPA1*01:02-B1*04:01L
ADVEWKFYDAQP

SEQ ID NO: 21293 - protein, 13 aa, Severe acute respiratory syndrome coronavirus 2
  REGION 1..13: note = Table B: HLA-DPA1*03:01-B1*04:02L HLA-DRB1*12:01L HLA-DPA1*01:02-B1*04:01L
SDKAYKIEELFYS

SEQ ID NO: 21294 - protein, 13 aa, Severe acute respiratory syndrome coronavirus 2
  REGION 1..13: note = Table B: HLA-DPA1*03:01-B1*04:02L
LFYSYATHSDKFT

SEQ ID NO: 21295 - protein, 19 aa, Severe acute respiratory syndrome coronavirus 2
  REGION 1..19: note = Table B: HLA-DPA1*03:01-B1*04:02L
YPANSIVCRFDTRVLSNLN

SEQ ID NO: 21296 - protein, 16 aa, Severe acute respiratory syndrome coronavirus 2
  REGION 1..16: note = Table B: HLA-DPA1*03:01-B1*04:02L HLA-DRB1*11:02L HLA-DRB1*14:02L HLA-DQA1*05:01-B1*02:01L HLA-DPA1*01:03-B1*04:02L HLA-DPA1*01:03-B1*104:01L
TRVLSNLNLPGCDGGS

SEQ ID NO: 21297 - protein, 11 aa, Severe acute respiratory syndrome coronavirus 2
  REGION 1..11: note = Table B: HLA-DPA1*03:01-B1*04:02L HLA-DPA1*01:02-B1*04:01L
VNLKQLPFFYY

SEQ ID NO: 21298 - protein, 14 aa, Severe acute respiratory syndrome coronavirus 2
  REGION 1..14: note = Table B: HLA-DPA1*03:01-B1*04:02L HLA-DPA1*01:03-B1*04:02L HLA-DPA1*01:02-B1*04:01L
NLKQLPFFYYSDSP

SEQ ID NO: 21299 - protein, 11 aa, Severe acute respiratory syndrome coronavirus 2
  REGION 1..11: note = Table B: HLA-DPA1*03:01-B1*04:02L HLA-DQA1*05:01-B1*02:01L HLA-DPA1*03:01-B1*105:01L HLA-DRB1*16:01L HLA-DQA1*01:03-B1*06:01L
DIDYVPLKSAT

SEQ ID NO: 21300 - protein, 12 aa, Severe acute respiratory syndrome coronavirus 2
  REGION 1..12: note = Table B: HLA-DPA1*03:01-B1*04:02L HLA-DRB1*14:01L HLA-DQA1*05:01-B1*02:01L
LDAYNMMISAGF

SEQ ID NO: 21301 - protein, 13 aa, Severe acute respiratory syndrome coronavirus 2
  REGION 1..13: note = Table B: HLA-DPA1*03:01-B1*04:02L HLA-DRB1*15:03L
ISAGFSLWVYKQF

SEQ ID NO: 21302 - protein, 10 aa, Severe acute respiratory syndrome coronavirus 2
  REGION 1..10: note = Table B: HLA-DPA1*03:01-B1*04:02L HLA-DPA1*03:01-B1*105:01L HLA-DPA1*01:02-B1*04:01L
NLWNTFTRLQ

SEQ ID NO: 21303 - protein, 11 aa, Severe acute respiratory syndrome coronavirus 2
  REGION 1..11: note = Table B: HLA-DPA1*03:01-B1*04:02L HLA-DPA1*01:03-B1*04:02L HLA-DPA1*03:01-B1*105:01L
WNTFTRLQSLE

SEQ ID NO: 21304 - protein, 12 aa, Severe acute respiratory syndrome coronavirus 2
  REGION 1..12: note = Table B: HLA-DPA1*03:01-B1*04:02L HLA-DQA1*05:01-B1*02:01L HLA-DPA1*01:03-B1*04:01L HLA-DRB1*12:01L HLA-DPA1*03:01-B1*105:01L HLA-DPA1*01:02-B1*04:01L HLA-DRB1*16:01L HLA-DRB1*15:03L
LQSLENVAFNVV

SEQ ID NO: 21305 - protein, 12 aa, Severe acute respiratory syndrome coronavirus 2
  REGION 1..12: note = Table B: HLA-DPA1*03:01-B1*04:02L HLA-DQA1*05:01-B1*02:01L HLA-DPA1*03:01-B1*105:01L
DGVDVELFENKT

SEQ ID NO: 21306 - protein, 11 aa, Severe acute respiratory syndrome coronavirus 2
  REGION 1..11: note = Table B: HLA-DPA1*03:01-B1*04:02L
KLEGYAFEHIV

SEQ ID NO: 21307 - protein, 12 aa, Severe acute respiratory syndrome coronavirus 2
  REGION 1..12: note = Table B: HLA-DPA1*03:01-B1*04:02L HLA-DPA1*03:01-B1*105:01L HLA-DRB1*16:01L
FEHIVYGDFSHS

SEQ ID NO: 21308 - protein, 17 aa, Severe acute respiratory syndrome coronavirus 2
  REGION 1..17: note = Table B: HLA-DPA1*03:01-B1*04:02L HLA-DQA1*05:05-B1*03:19L
LHLLIGLAKRFKESPFE

SEQ ID NO: 21309 - protein, 10 aa, Severe acute respiratory syndrome coronavirus 2
  REGION 1..10: note = Table B: HLA-DPA1*03:01-B1*04:02L HLA-DPA1*01:02-B1*04:01L
PFELEDFIPM

SEQ ID NO: 21310 - protein, 10 aa, Severe acute respiratory syndrome coronavirus 2
  REGION 1..10: note = Table B: HLA-DPA1*03:01-B1*04:02L HLA-DPA1*01:03-B1*04:01L HLA-DPA1*03:01-B1*105:01L HLA-DPA1*01:02-B1*04:01L
FELEDFIPMD

SEQ ID NO: 21311 - protein, 12 aa, Severe acute respiratory syndrome coronavirus 2
  REGION 1..12: note = Table B: HLA-DPA1*03:01-B1*04:02L
YTEISFMLWCKD

SEQ ID NO: 21312 - protein, 12 aa, Severe acute respiratory syndrome coronavirus 2
  REGION 1..12: note = Table B: HLA-DPA1*03:01-B1*04:02L HLA-DPA1*01:03-B1*04:02L HLA-DPA1*03:01-B1*105:01L
EISFMLWCKDGH

SEQ ID NO: 21313 - protein, 12 aa, Severe acute respiratory syndrome coronavirus 2
  REGION 1..12: note = Table B: HLA-DPA1*03:01-B1*04:02L
ISFMLWCKDGHV

SEQ ID NO: 21314 - protein, 12 aa, Severe acute respiratory syndrome coronavirus 2
  REGION 1..12: note = Table B: HLA-DPA1*03:01-B1*04:02L HLA-DPA1*01:03-B1*04:01L
AWQPGVAMPNLY

SEQ ID NO: 21315 - protein, 12 aa, Severe acute respiratory syndrome coronavirus 2
  REGION 1..12: note = Table B: HLA-DPA1*03:01-B1*04:02L HLA-DPA1*03:01-B1*105:01L
NVAKYTQLCQYL

SEQ ID NO: 21316 - protein, 12 aa, Severe acute respiratory syndrome coronavirus 2
  REGION 1..12: note = Table B: HLA-DPA1*03:01-B1*04:02L HLA-DPA1*03:01-B1*105:01L HLA-DPA1*01:02-B1*04:01L
VAKYTQLCQYLN

SEQ ID NO: 21317 - protein, 16 aa, Severe acute respiratory syndrome coronavirus 2
  REGION 1..16: note = Table B: HLA-DPA1*03:01-B1*04:02L HLA-DRB1*11:02L HLA-DRB1*11:01L
ADSTLIGDCATVHTAN

SEQ ID NO: 21318 - protein, 13 aa, Severe acute respiratory syndrome coronavirus 2
  REGION 1..13: note = Table B: HLA-DPA1*03:01-B1*04:02L HLA-DRB1*12:01L HLA-DPA1*03:01-B1*105:01L
TANKWDLIISDMY

SEQ ID NO: 21319 - protein, 10 aa, Severe acute respiratory syndrome coronavirus 2
  REGION 1..10: note = Table B: HLA-DPA1*03:01-B1*04:02L HLA-DPA1*01:03-B1*04:01L HLA-DPA1*03:01-B1*105:01L HLA-DPA1*01:02-B1*04:01L HLA-DQA1*01:03-B1*06:01L
SWNADLYKLM

SEQ ID NO: 21320 - protein, 10 aa, Severe acute respiratory syndrome coronavirus 2
  REGION 1..10: note = Table B: HLA-DPA1*03:01-B1*04:02L HLA-DPA1*03:01-B1*105:01L HLA-DPA1*01:02-B1*04:01L HLA-DQA1*01:03-B1*06:01L
WNADLYKLMG

SEQ ID NO: 21321 - protein, 11 aa, Severe acute respiratory syndrome coronavirus 2
  REGION 1..11: note = Table B: HLA-DPA1*03:01-B1*04:02L HLA-DQA1*05:05-B1*03:19L HLA-DRB1*12:01L HLA-DPA1*03:01-B1*105:01L HLA-DQA1*02:01-B1*03:03L HLA-DRB1*15:03L
DLYKLMGHFAW

SEQ ID NO: 21322 - protein, 11 aa, Severe acute respiratory syndrome coronavirus 2
  REGION 1..11: note = Table B: HLA-DPA1*03:01-B1*04:02L HLA-DQA1*05:05-B1*03:19L HLA-DQA1*05:01-B1*02:01L HLA-DPA1*01:03-B1*04:01L HLA-DRB1*12:01L HLA-DPA1*02:01-B1*13:01L HLA-DQA1*01:03-B1*06:01L HLA-DQA1*02:01-B1*03:03L
  REGION 1..11: note = CONT. FROM ABOVE: HLA-DRB1*15:03L
NPIQLSSYSLF

SEQ ID NO: 21323 - protein, 12 aa, Severe acute respiratory syndrome coronavirus 2
  REGION 1..12: note = Table B: HLA-DPA1*03:01-B1*04:02L HLA-DQA1*05:01-B1*02:01L HLA-DRB1*16:01L HLA-DRB1*15:03L
SSYSLFDMSKFP

SEQ ID NO: 21324 - protein, 12 aa, Severe acute respiratory syndrome coronavirus 2
  REGION 1..12: note = Table B: HLA-DPA1*03:01-B1*04:02L HLA-DPA1*02:01-B1*13:01L
SFTRGVYYPDKV

SEQ ID NO: 21325 - protein, 13 aa, Severe acute respiratory syndrome coronavirus 2
  REGION 1..13: note = Table B: HLA-DPA1*03:01-B1*04:02L
HSTQDLFLPFFSN

SEQ ID NO: 21326 - protein, 13 aa, Severe acute respiratory syndrome coronavirus 2
  REGION 1..13: note = Table B: HLA-DPA1*03:01-B1*04:02L
ATNVVIKVCEFQF

SEQ ID NO: 21327 - protein, 12 aa, Severe acute respiratory syndrome coronavirus 2
  REGION 1..12: note = Table B: HLA-DPA1*03:01-B1*04:02L
NVVIKVCEFQFC

SEQ ID NO: 21328 - protein, 12 aa, Severe acute respiratory syndrome coronavirus 2
  REGION 1..12: note = Table B: HLA-DPA1*03:01-B1*04:02L HLA-DPA1*01:03-B1*04:02L HLA-DPA1*03:01-B1*105:01L
VVIKVCEFQFCN

SEQ ID NO: 21329 - protein, 12 aa, Severe acute respiratory syndrome coronavirus 2
  REGION 1..12: note = Table B: HLA-DPA1*03:01-B1*04:02L HLA-DPA1*03:01-B1*105:01L
IKVCEFQFCNDP

SEQ ID NO: 21330 - protein, 11 aa, Severe acute respiratory syndrome coronavirus 2
  REGION 1..11: note = Table B: HLA-DPA1*03:01-B1*04:02L HLA-DPA1*01:03-B1*04:02L HLA-DPA1*03:01-B1*105:01L HLA-DRB1*16:01L HLA-DRB1*04:08L
PFLGVYYHKNN

SEQ ID NO: 21331 - protein, 10 aa, Severe acute respiratory syndrome coronavirus 2
  REGION 1..10: note = Table B: HLA-DPA1*03:01-B1*04:02L HLA-DPA1*03:01-B1*105:01L HLA-DPA1*01:02-B1*04:01L
WMESEFRVYS

SEQ ID NO: 21332 - protein, 13 aa, Severe acute respiratory syndrome coronavirus 2
  REGION 1..13: note = Table B: HLA-DPA1*03:01-B1*04:02L
EFRVYSSANNCTF

SEQ ID NO: 21333 - protein, 10 aa, Severe acute respiratory syndrome coronavirus 2
  REGION 1..10: note = Table B: HLA-DPA1*03:01-B1*04:02L HLA-DQA1*01-B1*05L HLA-DPA1*01:03-B1*04:01L HLA-DPA1*03:01-B1*105:01L HLA-DPA1*01:02-B1*04:01L HLA-DQA1*01:03-B1*06:01L
EYVSQPFLMD

SEQ ID NO: 21334 - protein, 12 aa, Severe acute respiratory syndrome coronavirus 2
  REGION 1..12: note = Table B: HLA-DPA1*03:01-B1*04:02L HLA-DPA1*03:01-B1*105:01L HLA-DPA1*01:02-B1*04:01L HLA-DQA1*01:03-B1*06:01L
VSQPFLMDLEGK

SEQ ID NO: 21335 - protein, 13 aa, Severe acute respiratory syndrome coronavirus 2
  REGION 1..13: note = Table B: HLA-DPA1*03:01-B1*04:02L HLA-DRB1*11:02L HLA-DRB1*11:03L HLA-DRB1*14:02L HLA-DQA1*05:05-B1*03:19L HLA-DQA1*05:05-B1*03:116L HLA-DPA1*01:03-B1*04:02L HLA-DPA1*01:03-B1*02:01L HLA-DQA1*05:05-B1*03:01L
  REGION 1..13: note = CONT. FROM ABOVE: HLA-DRB1*08:02L
GYFKIYSKHTPIN

SEQ ID NO: 21336 - protein, 13 aa, Severe acute respiratory syndrome coronavirus 2
  REGION 1..13: note = Table B: HLA-DPA1*03:01-B1*04:02L
PINLVRDLPQGFS

SEQ ID NO: 21337 - protein, 12 aa, Severe acute respiratory syndrome coronavirus 2
  REGION 1..12: note = Table B: HLA-DPA1*03:01-B1*04:02L HLA-DQA1*01-B1*05L HLA-DPA1*01:03-B1*04:02L HLA-DPA1*02:01-B1*13:01L
NITRFQTLLALH

SEQ ID NO: 21338 - protein, 14 aa, Severe acute respiratory syndrome coronavirus 2
  REGION 1..14: note = Table B: HLA-DPA1*03:01-B1*04:02L HLA-DRB1*10:01L
ITRFQTLLALHRSY

SEQ ID NO: 21339 - protein, 16 aa, Severe acute respiratory syndrome coronavirus 2
  REGION 1..16: note = Table B: HLA-DPA1*03:01-B1*04:02L
FQTLLALHRSYLTPGD

SEQ ID NO: 21340 - protein, 15 aa, Severe acute respiratory syndrome coronavirus 2
  REGION 1..15: note = Table B: HLA-DPA1*03:01-B1*04:02L HLA-DRB1*14:02L HLA-DQA1*05:05-B1*03:19L HLA-DPA1*01:03-B1*04:02L
TLLALHRSYLTPGDS

SEQ ID NO: 21341 - protein, 13 aa, Severe acute respiratory syndrome coronavirus 2
  REGION 1..13: note = Table B: HLA-DPA1*03:01-B1*04:02L HLA-DPA1*01:03-B1*04:02L HLA-DQA1*03:01-B1*03:02L
SSSGWTAGAAAYY

SEQ ID NO: 21342 - protein, 14 aa, Severe acute respiratory syndrome coronavirus 2
  REGION 1..14: note = Table B: HLA-DPA1*03:01-B1*04:02L HLA-DRB1*09:01L HLA-DPA1*01:03-B1*104:01L
FRVQPTESIVRFPN

SEQ ID NO: 21343 - protein, 14 aa, Severe acute respiratory syndrome coronavirus 2
  REGION 1..14: note = Table B: HLA-DPA1*03:01-B1*04:02L HLA-DRB1*11:02L HLA-DRB1*08:01L HLA-DRB5*01:01L HLA-DRB4*01:01L HLA-DPA1*01:03-B1*04:02L HLA-DRB3*01:01L HLA-DPA1*02:01-B1*13:01L HLA-DPA1*01:03-B1*104:01L
  REGION 1..14: note = CONT. FROM ABOVE: HLA-DRB1*08:02L HLA-DRB1*15:01L
STEIYQAGSTPCNG

SEQ ID NO: 21344 - protein, 12 aa, Severe acute respiratory syndrome coronavirus 2
  REGION 1..12: note = Table B: HLA-DPA1*03:01-B1*04:02L HLA-DRB1*14:01L HLA-DRB1*12:01L HLA-DRB1*16:01L
YQPYRVVVLSFE

SEQ ID NO: 21345 - protein, 13 aa, Severe acute respiratory syndrome coronavirus 2
  REGION 1..13: note = Table B: HLA-DPA1*03:01-B1*04:02L
QPYRVVVLSFELL

SEQ ID NO: 21346 - protein, 12 aa, Severe acute respiratory syndrome coronavirus 2
  REGION 1..12: note = Table B: HLA-DPA1*03:01-B1*04:02L HLA-DPA1*03:01-B1*105:01L HLA-DPA1*01:02-B1*04:01L
VVLSFELLHAPA

SEQ ID NO: 21347 - protein, 15 aa, Severe acute respiratory syndrome coronavirus 2
  REGION 1..15: note = Table B: HLA-DPA1*03:01-B1*04:02L HLA-DRB1*03:01L HLA-DRB1*11:02L HLA-DRB1*08:01L HLA-DPA1*01:03-B1*104:01L HLA-DQA1*01:03-B1*06:01L HLA-DRB1*08:02L
ENSVAYSNNSIAIPT

SEQ ID NO: 21348 - protein, 12 aa, Severe acute respiratory syndrome coronavirus 2
  REGION 1..12: note = Table B: HLA-DPA1*03:01-B1*04:02L HLA-DPA1*03:01-B1*105:01L
LLLQYGSFCTQL

SEQ ID NO: 21349 - protein, 16 aa, Severe acute respiratory syndrome coronavirus 2
  REGION 1..16: note = Table B: HLA-DPA1*03:01-B1*04:02L HLA-DPA1*01:03-B1*04:02L HLA-DPA1*01:03-B1*104:01L
KQIYKTPPIKDFGGFN

SEQ ID NO: 21350 - protein, 11 aa, Severe acute respiratory syndrome coronavirus 2
  REGION 1..11: note = Table B: HLA-DPA1*03:01-B1*04:02L HLA-DPA1*03:01-B1*105:01L HLA-DPA1*01:02-B1*04:01L
DLICAQKFNGL

SEQ ID NO: 21351 - protein, 11 aa, Severe acute respiratory syndrome coronavirus 2
  REGION 1..11: note = Table B: HLA-DPA1*03:01-B1*04:02L HLA-DPA1*03:01-B1*105:01L
LICAQKFNGLT

SEQ ID NO: 21352 - protein, 16 aa, Severe acute respiratory syndrome coronavirus 2
  REGION 1..16: note = Table B: HLA-DPA1*03:01-B1*04:02L HLA-DRB1*14:02L
SGWTFGAGAALQIPFA

SEQ ID NO: 21353 - protein, 13 aa, Severe acute respiratory syndrome coronavirus 2
  REGION 1..13: note = Table B: HLA-DPA1*03:01-B1*04:02L HLA-DRB1*12:01L HLA-DRB1*14:54L HLA-DRB1*14:17L
TQNVLYENQKLIA

SEQ ID NO: 21354 - protein, 12 aa, Severe acute respiratory syndrome coronavirus 2
  REGION 1..12: note = Table B: HLA-DPA1*03:01-B1*04:02L
SANLAATKMSEC

SEQ ID NO: 21355 - protein, 11 aa, Severe acute respiratory syndrome coronavirus 2
  REGION 1..11: note = Table B: HLA-DPA1*03:01-B1*04:02L HLA-DPA1*03:01-B1*105:01L
VFLHVTYVPAQ

SEQ ID NO: 21356 - protein, 16 aa, Severe acute respiratory syndrome coronavirus 2
  REGION 1..16: note = Table B: HLA-DPA1*03:01-B1*04:02L
AQEKNFTTAPAICHDG

SEQ ID NO: 21357 - protein, 12 aa, Severe acute respiratory syndrome coronavirus 2
  REGION 1..12: note = Table B: HLA-DPA1*03:01-B1*04:02L HLA-DPA1*02:01-B1*13:01L
WFVTQRNFYEPQ

SEQ ID NO: 21358 - protein, 13 aa, Severe acute respiratory syndrome coronavirus 2
  REGION 1..13: note = Table B: HLA-DPA1*03:01-B1*04:02L HLA-DQA1*01:03-B1*06:01L
FVTQRNFYEPQII

SEQ ID NO: 21359 - protein, 13 aa, Severe acute respiratory syndrome coronavirus 2
  REGION 1..13: note = Table B: HLA-DPA1*03:01-B1*04:02L
NASVVNIQKEIDR

SEQ ID NO: 21360 - protein, 14 aa, Severe acute respiratory syndrome coronavirus 2
  REGION 1..14: note = Table B: HLA-DPA1*03:01-B1*04:02L
ASVVNIQKEIDRLN

SEQ ID NO: 21361 - protein, 14 aa, Severe acute respiratory syndrome coronavirus 2
  REGION 1..14: note = Table B: HLA-DPA1*03:01-B1*04:02L HLA-DRB1*11:02L HLA-DRB1*14:02L HLA-DQA1*05:05-B1*03:19L HLA-DQA1*05:05-B1*03:116L HLA-DPA1*01:03-B1*04:02L HLA-DPA1*01:03-B1*02:01L HLA-DQA1*05:05-B1*03:01L
  REGION 1..14: note = CONT. FROM ABOVE: HLA-DRB1*07:01L HLA-DRB1*10:01L HLA-DRB1*08:02 L
IDRLNEVAKNLNES

SEQ ID NO: 21362 - protein, 13 aa, Severe acute respiratory syndrome coronavirus 2
  REGION 1..13: note = Table B: HLA-DPA1*03:01-B1*04:02L HLA-DPA1*03:01-B1*105:01L
EQYIKWPWYIWLG

SEQ ID NO: 21363 - protein, 16 aa, Severe acute respiratory syndrome coronavirus 2
  REGION 1..16: note = Table B: HLA-DPA1*03:01-B1*04:02L HLA-DRB1*03:01L
ASKIITLKKRWQLALS

SEQ ID NO: 21364 - protein, 10 aa, Severe acute respiratory syndrome coronavirus 2
  REGION 1..10: note = Table B: HLA-DPA1*03:01-B1*04:02L HLA-DPA1*03:01-B1*105:01L HLA-DPA1*01:02-B1*04:01L HLA-DRB1*15:03L
LLFVTVYSHL

SEQ ID NO: 21365 - protein, 10 aa, Severe acute respiratory syndrome coronavirus 2
  REGION 1..10: note = Table B: HLA-DPA1*03:01-B1*04:02L HLA-DQA1*05:01-B1*02:01L HLA-DPA1*01:03-B1*04:01L HLA-DRB1*12:01L HLA-DPA1*03:01-B1*105:01L HLA-DPA1*01:02-B1*04:01L HLA-DRB1*16:01L HLA-DQA1*01:03-B1*06:01L
  REGION 1..10: note = CONT. FROM ABOVE: HLA-DQA1*02:01-B1*03:03L HLA-DRB1*15:03L
LFVTVYSHLL

SEQ ID NO: 21366 - protein, 10 aa, Severe acute respiratory syndrome coronavirus 2
  REGION 1..10: note = Table B: HLA-DPA1*03:01-B1*04:02L HLA-DPA1*01:03-B1*04:02L HLA-DPA1*03:01-B1*105:01L HLA-DPA1*01:02-B1*04:01L HLA-DQA1*01:03-B1*06:01L
VYSHLLLVAA

SEQ ID NO: 21367 - protein, 11 aa, Severe acute respiratory syndrome coronavirus 2
  REGION 1..11: note = Table B: HLA-DPA1*03:01-B1*04:02L HLA-DPA1*03:01-B1*105:01L HLA-DPA1*01:02-B1*04:01L
YALVYFLQSIN

SEQ ID NO: 21368 - protein, 10 aa, Severe acute respiratory syndrome coronavirus 2
  REGION 1..10: note = Table B: HLA-DPA1*03:01-B1*04:02L HLA-DPA1*01:02-B1*04:01L
YDANYFLCWH

SEQ ID NO: 21369 - protein, 13 aa, Severe acute respiratory syndrome coronavirus 2
  REGION 1..13: note = Table B: HLA-DPA1*03:01-B1*04:02L HLA-DRB1*14:01L HLA-DRB1*12:01L HLA-DPA1*01:02-B1*04:01L
DTGVEHVTFFIYN

SEQ ID NO: 21370 - protein, 13 aa, Severe acute respiratory syndrome coronavirus 2
  REGION 1..13: note = Table B: HLA-DPA1*03:01-B1*04:02L HLA-DPA1*03:01-B1*105:01L HLA-DPA1*01:02-B1*04:01L
VEHVTFFIYNKIV

SEQ ID NO: 21371 - protein, 12 aa, Severe acute respiratory syndrome coronavirus 2
  REGION 1..12: note = Table B: HLA-DPA1*03:01-B1*04:02L HLA-DPA1*03:01-B1*105:01L HLA-DPA1*01:02-B1*04:01L HLA-DRB1*15:03L
HVTFFIYNKIVD

SEQ ID NO: 21372 - protein, 10 aa, Severe acute respiratory syndrome coronavirus 2
  REGION 1..10: note = Table B: HLA-DPA1*03:01-B1*04:02L HLA-DQA1*01-B1*05L HLA-DPA1*03:01-B1*105:01L HLA-DPA1*01:02-B1*04:01L HLA-DQA1*01:03-B1*06:01L
FIYNKIVDEP

SEQ ID NO: 21373 - protein, 11 aa, Severe acute respiratory syndrome coronavirus 2
  REGION 1..11: note = Table B: HLA-DPA1*03:01-B1*04:02L
GVVNPVMEPIY

SEQ ID NO: 21374 - protein, 11 aa, Severe acute respiratory syndrome coronavirus 2
  REGION 1..11: note = Table B: HLA-DPA1*03:01-B1*04:02L HLA-DQA1*05:05-B1*03:116L HLA-DQA1*03:01-B1*03:02L HLA-DPA1*01:03-B1*104:01L HLA-DPA1*01:02-B1*04:01L
EETGTLIVNSV

SEQ ID NO: 21375 - protein, 11 aa, Severe acute respiratory syndrome coronavirus 2
  REGION 1..11: note = Table B: HLA-DPA1*03:01-B1*04:02L HLA-DQA1*05:01-B1*02:01L HLA-DRB1*12:01L
GTLIVNSVLLF

SEQ ID NO: 21376 - protein, 11 aa, Severe acute respiratory syndrome coronavirus 2
  REGION 1..11: note = Table B: HLA-DPA1*03:01-B1*04:02L HLA-DRB1*12:01L HLA-DPA1*03:01-B1*105:01L
AILTALRLCAY

SEQ ID NO: 21377 - protein, 11 aa, Severe acute respiratory syndrome coronavirus 2
  REGION 1..11: note = Table B: HLA-DPA1*03:01-B1*04:02L
MWLSYFIASFR

SEQ ID NO: 21378 - protein, 11 aa, Severe acute respiratory syndrome coronavirus 2
  REGION 1..11: note = Table B: HLA-DPA1*03:01-B1*04:02L HLA-DPA1*03:01-B1*105:01L HLA-DQA1*01:03-B1*06:01L HLA-DRB1*04:08L
TILTRPLLESE

SEQ ID NO: 21379 - protein, 13 aa, Severe acute respiratory syndrome coronavirus 2
  REGION 1..13: note = Table B: HLA-DPA1*03:01-B1*04:02L HLA-DPA1*02:01-B1*13:01L
YYKLGASQRVAGD

SEQ ID NO: 21380 - protein, 13 aa, Severe acute respiratory syndrome coronavirus 2
  REGION 1..13: note = Table B: HLA-DPA1*03:01-B1*04:02L HLA-DRB1*14:02L HLA-DPA1*01:03-B1*04:01L HLA-DPA1*01:03-B1*04:02L HLA-DPA1*01:02-B1*04:01L
VAGDSGFAAYSRY

SEQ ID NO: 21381 - protein, 15 aa, Severe acute respiratory syndrome coronavirus 2
  REGION 1..15: note = Table B: HLA-DPA1*03:01-B1*04:02L
SRYRIGNYKLNTDHS

SEQ ID NO: 21382 - protein, 12 aa, Severe acute respiratory syndrome coronavirus 2
  REGION 1..12: note = Table B: HLA-DPA1*03:01-B1*04:02L HLA-DQA1*05:01-B1*02:01L HLA-DPA1*01:03-B1*04:01L HLA-DPA1*03:01-B1*105:01L HLA-DRB1*15:03L
VSIWNLDYIINL

SEQ ID NO: 21383 - protein, 12 aa, Severe acute respiratory syndrome coronavirus 2
  REGION 1..12: note = Table B: HLA-DPA1*03:01-B1*04:02L HLA-DPA1*03:01-B1*105:01L HLA-DRB1*15:03L
WNLDYIINLIIK

SEQ ID NO: 21384 - protein, 12 aa, Severe acute respiratory syndrome coronavirus 2
  REGION 1..12: note = Table B: HLA-DPA1*03:01-B1*04:02L
VQELYSPIFLIV

SEQ ID NO: 21385 - protein, 11 aa, Severe acute respiratory syndrome coronavirus 2
  REGION 1..11: note = Table B: HLA-DPA1*03:01-B1*04:02L
ELYSPIFLIVA

SEQ ID NO: 21386 - protein, 12 aa, Severe acute respiratory syndrome coronavirus 2
  REGION 1..12: note = Table B: HLA-DPA1*03:01-B1*04:02L HLA-DQA1*01-B1*05L HLA-DPA1*01:03-B1*04:02L
IFWFSLELQDHN

SEQ ID NO: 21387 - protein, 12 aa, Severe acute respiratory syndrome coronavirus 2
  REGION 1..12: note = Table B: HLA-DPA1*03:01-B1*04:02L HLA-DPA1*01:03-B1*04:02L HLA-DPA1*01:02-B1*04:01L
FWFSLELQDHNE

SEQ ID NO: 21388 - protein, 10 aa, Severe acute respiratory syndrome coronavirus 2
  REGION 1..10: note = Table B: HLA-DPA1*03:01-B1*04:02L HLA-DPA1*01:03-B1*04:01L HLA-DPA1*01:03-B1*04:02L HLA-DPA1*03:01-B1*105:01L HLA-DPA1*01:02-B1*04:01L HLA-DRB1*16:01L HLA-DRB1*04:08L
FYSKWYIRVG

SEQ ID NO: 21389 - protein, 16 aa, Severe acute respiratory syndrome coronavirus 2
  REGION 1..16: note = Table B: HLA-DPA1*03:01-B1*04:02L HLA-DPA1*01:03-B1*104:01L HLA-DRB1*15:01L
YSKWYIRVGARKSAPL

SEQ ID NO: 21390 - protein, 13 aa, Severe acute respiratory syndrome coronavirus 2
  REGION 1..13: note = Table B: HLA-DPA1*03:01-B1*04:02L HLA-DPA1*03:01-B1*105:01L
GSLVVRCSFYEDF

SEQ ID NO: 21391 - protein, 12 aa, Severe acute respiratory syndrome coronavirus 2
  REGION 1..12: note = Table B: HLA-DPA1*03:01-B1*04:02L HLA-DPA1*03:01-B1*105:01L
LVVRCSFYEDFL

SEQ ID NO: 21392 - protein, 10 aa, Severe acute respiratory syndrome coronavirus 2
  REGION 1..10: note = Table B: HLA-DPA1*03:01-B1*04:02L HLA-DQA1*01-B1*05L HLA-DPA1*01:03-B1*04:01L HLA-DPA1*01:03-B1*04:02L HLA-DPA1*03:01-B1*105:01L HLA-DPA1*01:02-B1*04:01L HLA-DRB1*16:01L HLA-DQA1*01:03-B1*06:01L HLA-DRB1*04:08L
SFYEDFLEYH

SEQ ID NO: 21393 - protein, 15 aa, Severe acute respiratory syndrome coronavirus 2
  REGION 1..15: note = Table B: HLA-DPA1*03:01-B1*04:02L HLA-DQA1*01-B1*05L HLA-DPA1*01:02-B1*04:01L
GANKDGIIWVATEGA

SEQ ID NO: 21394 - protein, 10 aa, Severe acute respiratory syndrome coronavirus 2
  REGION 1..10: note = Table B: HLA-DPA1*03:01-B1*04:02L
ALALLLLDRL

SEQ ID NO: 21395 - protein, 16 aa, Severe acute respiratory syndrome coronavirus 2
  REGION 1..16: note = Table B: HLA-DPA1*03:01-B1*04:02L HLA-DPA1*01:03-B1*04:02L
ELIRQGTDYKHWPQIA

SEQ ID NO: 21396 - protein, 13 aa, Severe acute respiratory syndrome coronavirus 2
  REGION 1..13: note = Table B: HLA-DPA1*03:01-B1*04:02L HLA-DPA1*03:01-B1*105:01L
GTDYKHWPQIAQF

SEQ ID NO: 21397 - protein, 11 aa, Severe acute respiratory syndrome coronavirus 2
  REGION 1..11: note = Table B: HLA-DPA1*03:01-B1*04:02L HLA-DRB1*11:02L
VILLNKHIDAY

SEQ ID NO: 21398 - protein, 13 aa, Severe acute respiratory syndrome coronavirus 2
  REGION 1..13: note = Table B: HLA-DPA1*03:01-B1*04:02L
TVTLLPAADLDDF

SEQ ID NO: 21399 - protein, 10 aa, Severe acute respiratory syndrome coronavirus 2
  REGION 1..10: note = Table B: HLA-DPA1*03:01-B1*04:02L HLA-DPA1*03:01-B1*105:01L HLA-DQA1*01:03-B1*06:01L HLA-DRB1*15:03L
AFPFTIYSLL

SEQ ID NO: 21400 - protein, 11 aa, Severe acute respiratory syndrome coronavirus 2
  REGION 1..11: note = Table B: HLA-DPA1*03:01-B1*04:02L HLA-DPA1*01:02-B1*04:01L
PFTIYSLLLCR

SEQ ID NO: 21401 - protein, 11 aa, Severe acute respiratory syndrome coronavirus 2
  REGION 1..11: note = Table B: HLA-DPA1*03:01-B1*04:02L HLA-DPA1*03:01-B1*105:01L HLA-DPA1*01:02-B1*04:01L
TIYSLLLCRMN

SEQ ID NO: 21402 - protein, 16 aa, Severe acute respiratory syndrome coronavirus 2
  REGION 1..16: note = Table B: HLA-DRB1*03:01L
EIPVAYRKVLLRKNGN

SEQ ID NO: 21403 - protein, 18 aa, Severe acute respiratory syndrome coronavirus 2
  REGION 1..18: note = Table B: HLA-DRB1*03:01L HLA-DRB1*11:02L HLA-DRB1*11:03L HLA-DRB1*14:02L HLA-DQA1*05:05-B1*03:19L HLA-DQA1*05:01-B1*02:01L HLA-DRB4*01:01L HLA-DPA1*01:03-B1*04:01L HLA-DRB1*09:01L HLA-DRB1*08:02L
GPDGYPLECIKDLLARAG

SEQ ID NO: 21404 - protein, 15 aa, Severe acute respiratory syndrome coronavirus 2
  REGION 1..15: note = Table B: HLA-DRB1*03:01L
FPLNSIIKTIQPRVE

SEQ ID NO: 21405 - protein, 16 aa, Severe acute respiratory syndrome coronavirus 2
  REGION 1..16: note = Table B: HLA-DRB1*03:01L HLA-DPA1*02:01-B1*13:01L
IIKTIQPRVEKKKLDG

SEQ ID NO: 21406 - protein, 17 aa, Severe acute respiratory syndrome coronavirus 2
  REGION 1..17: note = Table B: HLA-DRB1*03:01L
VFSYVGCHNKCAYWVPR

SEQ ID NO: 21407 - protein, 15 aa, Severe acute respiratory syndrome coronavirus 2
  REGION 1..15: note = Table B: HLA-DRB1*03:01L HLA-DRB1*13:01L HLA-DPA1*01:03-B1*104:01L
DNLLEILQKEKVNIN

SEQ ID NO: 21408 - protein, 14 aa, Severe acute respiratory syndrome coronavirus 2
  REGION 1..14: note = Table B: HLA-DRB1*03:01L HLA-DRB1*11:02L HLA-DRB4*01:01L HLA-DQA1*05:05-B1*03:116L HLA-DPA1*01:03-B1*02:01L HLA-DRB1*08:02L
SPLYAFASEAARVV

SEQ ID NO: 21409 - protein, 12 aa, Severe acute respiratory syndrome coronavirus 2
  REGION 1..12: note = Table B: HLA-DRB1*03:01L HLA-DPA1*01:03-B1*104:01L
YAFASEAARVVR

SEQ ID NO: 21410 - protein, 13 aa, Severe acute respiratory syndrome coronavirus 2
  REGION 1..13: note = Table B: HLA-DRB1*03:01L HLA-DRB1*11:03L
FSRTLETAQNSVR

SEQ ID NO: 21411 - protein, 15 aa, Severe acute respiratory syndrome coronavirus 2
  REGION 1..15: note = Table B: HLA-DRB1*03:01L HLA-DRB1*11:02L
VGGQIVTCAKEIKES

SEQ ID NO: 21412 - protein, 16 aa, Severe acute respiratory syndrome coronavirus 2
  REGION 1..16: note = Table B: HLA-DRB1*03:01L HLA-DRB4*01:01L HLA-DRB1*09:01L
APTKVTFGDDTVIEVQ

SEQ ID NO: 21413 - protein, 15 aa, Severe acute respiratory syndrome coronavirus 2
  REGION 1..15: note = Table B: HLA-DRB1*03:01L HLA-DRB1*11:01L
VQPQLEMELTPVVQT

SEQ ID NO: 21414 - protein, 14 aa, Severe acute respiratory syndrome coronavirus 2
  REGION 1..14: note = Table B: HLA-DRB1*03:01L
TDNVYIKNADIVEE

SEQ ID NO: 21415 - protein, 14 aa, Severe acute respiratory syndrome coronavirus 2
  REGION 1..14: note = Table B: HLA-DRB1*03:01L HLA-DRB1*11:02L HLA-DRB1*13:01L HLA-DQA1*05:05-B1*03:116L HLA-DRB1*15:01L
DNVYIKNADIVEEA

SEQ ID NO: 21416 - protein, 14 aa, Severe acute respiratory syndrome coronavirus 2
  REGION 1..14: note = Table B: HLA-DRB1*03:01L HLA-DRB1*14:02L HLA-DRB1*13:01L HLA-DPA1*03:01-B1*105:01L HLA-DPA1*01:03-B1*02:01L
NADIVEEAKKVKPT

SEQ ID NO: 21417 - protein, 12 aa, Severe acute respiratory syndrome coronavirus 2
  REGION 1..12: note = Table B: HLA-DRB1*03:01L HLA-DRB4*02:01NL HLA-DRB1*13:01L HLA-DRB4*01:01L
SDDYIATNGPLK

SEQ ID NO: 21418 - protein, 14 aa, Severe acute respiratory syndrome coronavirus 2
  REGION 1..14: note = Table B: HLA-DRB1*03:01L HLA-DPA1*01:03-B1*04:02L HLA-DRB1*07:01L HLA-DRB1*08:02L
SFLEMKSEKQVEQK

SEQ ID NO: 21419 - protein, 14 aa, Severe acute respiratory syndrome coronavirus 2
  REGION 1..14: note = Table B: HLA-DRB1*03:01L HLA-DRB1*11:02L HLA-DQA1*01:01-B1*05:01L HLA-DRB1*04:10L
VTTTLEETKFLTEN

SEQ ID NO: 21420 - protein, 13 aa, Severe acute respiratory syndrome coronavirus 2
  REGION 1..13: note = Table B: HLA-DRB1*03:01L HLA-DQA1*05:05-B1*03:19L
LLYIDINGNLHPD

SEQ ID NO: 21421 - protein, 13 aa, Severe acute respiratory syndrome coronavirus 2
  REGION 1..13: note = Table B: HLA-DRB1*03:01L
NGYTVEEAKTVLK

SEQ ID NO: 21422 - protein, 14 aa, Severe acute respiratory syndrome coronavirus 2
  REGION 1..14: note = Table B: HLA-DRB1*03:01L HLA-DRB1*11:02L HLA-DRB1*15:01L
KSAFYILPSIISNE

SEQ ID NO: 21423 - protein, 14 aa, Severe acute respiratory syndrome coronavirus 2
  REGION 1..14: note = Table B: HLA-DRB1*03:01L HLA-DRB1*11:02L HLA-DRB1*13:01L HLA-DPA1*01:03-B1*04:01L HLA-DQA1*05:05-B1*03:116L HLA-DRB1*15:01L
SAFYILPSIISNEK

SEQ ID NO: 21424 - protein, 14 aa, Severe acute respiratory syndrome coronavirus 2
  REGION 1..14: note = Table B: HLA-DRB1*03:01L HLA-DQA1*01:01-B1*05:01L HLA-DRB1*11:01L HLA-DRB5*01:01L HLA-DPA1*01:03-B1*04:02L
EKQEILGTVSWNLR

SEQ ID NO: 21425 - protein, 14 aa, Severe acute respiratory syndrome coronavirus 2
  REGION 1..14: note = Table B: HLA-DRB1*03:01L
LREMLAHAEETRKL

SEQ ID NO: 21426 - protein, 16 aa, Severe acute respiratory syndrome coronavirus 2
  REGION 1..16: note = Table B: HLA-DRB1*03:01L
REMLAHAEETRKLMPV

SEQ ID NO: 21427 - protein, 16 aa, Severe acute respiratory syndrome coronavirus 2
  REGION 1..16: note = Table B: HLA-DRB1*03:01L HLA-DRB1*11:01L
VSTIQRKYKGIKIQEG

SEQ ID NO: 21428 - protein, 16 aa, Severe acute respiratory syndrome coronavirus 2
  REGION 1..16: note = Table B: HLA-DRB1*03:01L HLA-DRB1*11:02L HLA-DRB3*01:01L HLA-DPA1*01:03-B1*02:01L HLA-DPA1*01:03-B1*104:01L HLA-DRB1*08:02L HLA-DRB1*15:01L
VTAYNGYLTSSSKTPE

SEQ ID NO: 21429 - protein, 14 aa, Severe acute respiratory syndrome coronavirus 2
  REGION 1..14: note = Table B: HLA-DRB1*03:01L HLA-DRB1*11:02L HLA-DRB4*01:01L
NGYLTSSSKTPEEH

SEQ ID NO: 21430 - protein, 17 aa, Severe acute respiratory syndrome coronavirus 2
  REGION 1..17: note = Table B: HLA-DRB1*03:01L
TPEEHFIETISLAGSYK

SEQ ID NO: 21431 - protein, 14 aa, Severe acute respiratory syndrome coronavirus 2
  REGION 1..14: note = Table B: HLA-DRB1*03:01L HLA-DRB1*11:02L HLA-DRB3*01:01L
VYYTSNPTTFHLDG

SEQ ID NO: 21432 - protein, 13 aa, Severe acute respiratory syndrome coronavirus 2
  REGION 1..13: note = Table B: HLA-DRB1*03:01L HLA-DRB1*11:01L HLA-DRB3*01:01L HLA-DPA1*01:03-B1*02:01L HLA-DPA1*01:03-B1*104:01L
IKVFTTVDNINLH

SEQ ID NO: 21433 - protein, 14 aa, Severe acute respiratory syndrome coronavirus 2
  REGION 1..14: note = Table B: HLA-DRB1*03:01L HLA-DRB1*11:02L HLA-DRB4*01:01L HLA-DPA1*01:03-B1*02:01L HLA-DRB1*08:02L HLA-DRB1*15:01L
GKTFYVLPNDDTLR

SEQ ID NO: 21434 - protein, 13 aa, Severe acute respiratory syndrome coronavirus 2
  REGION 1..13: note = Table B: HLA-DRB1*03:01L HLA-DRB1*07:01L HLA-DQA1*01:03-B1*06:01L
IELKFNPPALQDA

SEQ ID NO: 21435 - protein, 13 aa, Severe acute respiratory syndrome coronavirus 2
  REGION 1..13: note = Table B: HLA-DRB1*03:01L HLA-DRB1*11:02L HLA-DPA1*01:03-B1*04:02L HLA-DQA1*01:03-B1*06:01L
ESPFVMMSAPPAQ

SEQ ID NO: 21436 - protein, 14 aa, Severe acute respiratory syndrome coronavirus 2
  REGION 1..14: note = Table B: HLA-DRB1*03:01L HLA-DQA1*01:01-B1*05:01L HLA-DRB4*01:01L HLA-DRB1*08:02L
NSYFTEQPIDLVPN

SEQ ID NO: 21437 - protein, 13 aa, Severe acute respiratory syndrome coronavirus 2
  REGION 1..13: note = Table B: HLA-DRB1*03:01L HLA-DRB1*08:01L HLA-DRB1*11:01L HLA-DRB1*12:02L
KVTFFPDLNGDVV

SEQ ID NO: 21438 - protein, 13 aa, Severe acute respiratory syndrome coronavirus 2
  REGION 1..13: note = Table B: HLA-DRB1*03:01L HLA-DRB5*01:01L
VTFFPDLNGDVVA

SEQ ID NO: 21439 - protein, 14 aa, Severe acute respiratory syndrome coronavirus 2
  REGION 1..14: note = Table B: HLA-DRB1*03:01L HLA-DRB1*11:02L HLA-DRB4*02:01NL HLA-DPA1*01:03-B1*02:01L HLA-DPA1*01:02-B1*04:01L HLA-DRB1*15:01L
SNSFDVLKSEDAQG

SEQ ID NO: 21440 - protein, 16 aa, Severe acute respiratory syndrome coronavirus 2
  REGION 1..16: note = Table B: HLA-DRB1*03:01L HLA-DPA1*02:01-B1*13:01L HLA-DPA1*03:01-B1*105:01L
SSLTIKKPNELSRVLG

SEQ ID NO: 21441 - protein, 16 aa, Severe acute respiratory syndrome coronavirus 2
  REGION 1..16: note = Table B: HLA-DRB1*03:01L HLA-DRB1*11:02L HLA-DPA1*01:03-B1*02:01L
VPWDTIANYAKPFLNK

SEQ ID NO: 21442 - protein, 14 aa, Severe acute respiratory syndrome coronavirus 2
  REGION 1..14: note = Table B: HLA-DRB1*03:01L HLA-DPA1*01:03-B1*02:01L
EASFNYLKSPNFSK

SEQ ID NO: 21443 - protein, 16 aa, Severe acute respiratory syndrome coronavirus 2
  REGION 1..16: note = Table B: HLA-DRB1*03:01L HLA-DRB1*13:01L
ASFYYVWKSYVHVVDG

SEQ ID NO: 21444 - protein, 12 aa, Severe acute respiratory syndrome coronavirus 2
  REGION 1..12: note = Table B: HLA-DRB1*03:01L HLA-DRB4*02:01NL HLA-DRB1*13:01L HLA-DPA1*01:03-B1*04:01L HLA-DPA1*01:03-B1*104:01L
GSTFISDEVARD

SEQ ID NO: 21445 - protein, 12 aa, Severe acute respiratory syndrome coronavirus 2
  REGION 1..12: note = Table B: HLA-DRB1*03:01L HLA-DRB1*13:01L HLA-DPA1*01:03-B1*02:01L
STFISDEVARDL

SEQ ID NO: 21446 - protein, 16 aa, Severe acute respiratory syndrome coronavirus 2
  REGION 1..16: note = Table B: HLA-DRB1*03:01L HLA-DRB1*11:02L HLA-DRB1*14:02L HLA-DRB1*08:03L
VARDLSLQFKRPINPT

SEQ ID NO: 21447 - protein, 14 aa, Severe acute respiratory syndrome coronavirus 2
  REGION 1..14: note = Table B: HLA-DRB1*03:01L
YIVDSVTVKNGSIH

SEQ ID NO: 21448 - protein, 14 aa, Severe acute respiratory syndrome coronavirus 2
  REGION 1..14: note = Table B: HLA-DRB1*03:01L HLA-DRB1*11:02L HLA-DRB4*01:01L HLA-DQA1*01:03-B1*06:01L HLA-DRB1*15:01L
LSHFVNLDNLRANN

SEQ ID NO: 21449 - protein, 14 aa, Severe acute respiratory syndrome coronavirus 2
  REGION 1..14: note = Table B: HLA-DRB1*03:01L HLA-DPA1*01:03-B1*04:02L
SHFVNLDNLRANNT

SEQ ID NO: 21450 - protein, 11 aa, Severe acute respiratory syndrome coronavirus 2
  REGION 1..11: note = Table B: HLA-DRB1*03:01L HLA-DRB3*01:01L HLA-DRB1*16:01L
VIVFDGKSKCE

SEQ ID NO: 21451 - protein, 14 aa, Severe acute respiratory syndrome coronavirus 2
  REGION 1..14: note = Table B: HLA-DRB1*03:01L HLA-DRB1*11:02L HLA-DRB4*01:01L HLA-DRB1*08:02L HLA-DRB1*15:01L
KTLVATAEAELAKN

SEQ ID NO: 21452 - protein, 16 aa, Severe acute respiratory syndrome coronavirus 2
  REGION 1..16: note = Table B: HLA-DRB1*03:01L
DNVLSTFISAARQGFV

SEQ ID NO: 21453 - protein, 14 aa, Severe acute respiratory syndrome coronavirus 2
  REGION 1..14: note = Table B: HLA-DRB1*03:01L
TFISAARQGFVDSD

SEQ ID NO: 21454 - protein, 18 aa, Severe acute respiratory syndrome coronavirus 2
  REGION 1..18: note = Table B: HLA-DRB1*03:01L
TRQVVNVVTTKIALKGGK

SEQ ID NO: 21455 - protein, 14 aa, Severe acute respiratory syndrome coronavirus 2
  REGION 1..14: note = Table B: HLA-DRB1*03:01L
AAIFYLITPVHVMS

SEQ ID NO: 21456 - protein, 14 aa, Severe acute respiratory syndrome coronavirus 2
  REGION 1..14: note = Table B: HLA-DRB1*03:01L
SEIIGYKAIDGGVT

SEQ ID NO: 21457 - protein, 12 aa, Severe acute respiratory syndrome coronavirus 2
  REGION 1..12: note = Table B: HLA-DRB1*03:01L
ESLRPDTRYVLM

SEQ ID NO: 21458 - protein, 12 aa, Severe acute respiratory syndrome coronavirus 2
  REGION 1..12: note = Table B: HLA-DRB1*03:01L
SLRPDTRYVLMD

SEQ ID NO: 21459 - protein, 14 aa, Severe acute respiratory syndrome coronavirus 2
  REGION 1..14: note = Table B: HLA-DRB1*03:01L HLA-DRB1*11:03L HLA-DRB1*14:02L HLA-DPA1*01:03-B1*104:01L
RWVLNNDYYRSLPG

SEQ ID NO: 21460 - protein, 15 aa, Severe acute respiratory syndrome coronavirus 2
  REGION 1..15: note = Table B: HLA-DRB1*03:01L HLA-DRB1*11:02L HLA-DRB5*01:01L HLA-DRB4*02:01NL HLA-DPA1*01:03-B1*04:02L HLA-DRB1*08:02L
TPLIQPIGALDISAS

SEQ ID NO: 21461 - protein, 14 aa, Severe acute respiratory syndrome coronavirus 2
  REGION 1..14: note = Table B: HLA-DRB1*03:01L HLA-DRB1*11:02L
FYLTNDVSFLAHIQ

SEQ ID NO: 21462 - protein, 17 aa, Severe acute respiratory syndrome coronavirus 2
  REGION 1..17: note = Table B: HLA-DRB1*03:01L
LKRRVVFNGVSFSTFEE

SEQ ID NO: 21463 - protein, 14 aa, Severe acute respiratory syndrome coronavirus 2
  REGION 1..14: note = Table B: HLA-DRB1*03:01L
NHNFLVQAGNVQLR

SEQ ID NO: 21464 - protein, 14 aa, Severe acute respiratory syndrome coronavirus 2
  REGION 1..14: note = Table B: HLA-DRB1*03:01L HLA-DQA1*01:01-B1*05:01L HLA-DPA1*02:01-B1*13:01L HLA-DRB1*07:01L HLA-DQA1*01:03-B1*06:01L
YGPFVDRQTAQAAG

SEQ ID NO: 21465 - protein, 16 aa, Severe acute respiratory syndrome coronavirus 2
  REGION 1..16: note = Table B: HLA-DRB1*03:01L HLA-DRB1*11:02L HLA-DRB4*01:01L HLA-DQA1*05:05-B1*03:116L
VAMKYNYEPLTQDHVD

SEQ ID NO: 21466 - protein, 15 aa, Severe acute respiratory syndrome coronavirus 2
  REGION 1..15: note = Table B: HLA-DRB1*03:01L HLA-DRB1*11:02L HLA-DRB4*02:01NL HLA-DPA1*01:03-B1*04:02L HLA-DPA1*01:03-B1*104:01L HLA-DRB1*08:02L HLA-DRB1*08:03L
TQEFRYMNSQGLLPP

SEQ ID NO: 21467 - protein, 17 aa, Severe acute respiratory syndrome coronavirus 2
  REGION 1..17: note = Table B: HLA-DRB1*03:01L
DSEVVLKKLKKSLNVAK

SEQ ID NO: 21468 - protein, 15 aa, Severe acute respiratory syndrome coronavirus 2
  REGION 1..15: note = Table B: HLA-DRB1*03:01L HLA-DRB1*11:02L HLA-DRB1*08:02L HLA-DRB1*15:01L
VPLNIIPLTTAAKLM

SEQ ID NO: 21469 - protein, 11 aa, Severe acute respiratory syndrome coronavirus 2
  REGION 1..11: note = Table B: HLA-DRB1*03:01L HLA-DRB4*01:01L HLA-DPA1*02:01-B1*13:01L HLA-DQA1*01:03-B1*06:01L HLA-DRB1*08:03L
VVDADSKIVQL

SEQ ID NO: 21470 - protein, 15 aa, Severe acute respiratory syndrome coronavirus 2
  REGION 1..15: note = Table B: HLA-DRB1*03:01L HLA-DRB1*11:02L HLA-DRB1*14:02L HLA-DRB1*09:01L HLA-DPA1*01:03-B1*04:02L HLA-DPA1*02:01-B1*13:01L HLA-DPA1*01:03-B1*02:01L HLA-DPA1*01:03-B1*104:01L HLA-DRB1*07:01L HLA-DRB1*08:02L
  REGION 1..15: note = CONT. FROM ABOVE: HLA-DRB1*08:03L HLA-DRB1*15:01L
WPLIVTALRANSAVK

SEQ ID NO: 21471 - protein, 14 aa, Severe acute respiratory syndrome coronavirus 2
  REGION 1..14: note = Table B: HLA-DRB1*03:01L HLA-DRB1*11:02L HLA-DRB1*13:01L HLA-DPA1*01:03-B1*04:02L
NSAVKLQNNELSPV

SEQ ID NO: 21472 - protein, 14 aa, Severe acute respiratory syndrome coronavirus 2
  REGION 1..14: note = Table B: HLA-DRB1*03:01L HLA-DRB1*11:02L HLA-DPA1*01:03-B1*04:02L
SAVKLQNNELSPVA

SEQ ID NO: 21473 - protein, 17 aa, Severe acute respiratory syndrome coronavirus 2
  REGION 1..17: note = Table B: HLA-DRB1*03:01L
EPPCRFVTDTPKGPKVK

SEQ ID NO: 21474 - protein, 17 aa, Severe acute respiratory syndrome coronavirus 2
  REGION 1..17: note = Table B: HLA-DRB1*03:01L
GPKVKYLYFIKGLNNLN

SEQ ID NO: 21475 - protein, 16 aa, Severe acute respiratory syndrome coronavirus 2
  REGION 1..16: note = Table B: HLA-DRB1*03:01L
VKYLYFIKGLNNLNRG

SEQ ID NO: 21476 - protein, 13 aa, Severe acute respiratory syndrome coronavirus 2
  REGION 1..13: note = Table B: HLA-DRB1*03:01L HLA-DRB1*11:01L HLA-DRB4*01:01L HLA-DRB3*01:01L HLA-DPA1*01:03-B1*02:01L HLA-DRB1*08:03L
RGMVLGSLAATVR

SEQ ID NO: 21477 - protein, 15 aa, Severe acute respiratory syndrome coronavirus 2
  REGION 1..15: note = Table B: HLA-DRB1*03:01L HLA-DPA1*01:02-B1*04:01L
LGSLAATVRLQAGNA

SEQ ID NO: 21478 - protein, 15 aa, Severe acute respiratory syndrome coronavirus 2
  REGION 1..15: note = Table B: HLA-DRB1*03:01L HLA-DRB1*13:01L HLA-DPA1*01:03-B1*04:01L HLA-DRB1*08:02L HLA-DRB1*15:01L
TGQAITVTPEANMDQ

SEQ ID NO: 21479 - protein, 15 aa, Severe acute respiratory syndrome coronavirus 2
  REGION 1..15: note = Table B: HLA-DRB1*03:01L HLA-DRB1*11:02L
REPMLQSADAQSFLN

SEQ ID NO: 21480 - protein, 15 aa, Severe acute respiratory syndrome coronavirus 2
  REGION 1..15: note = Table B: HLA-DRB1*03:01L
EPMLQSADAQSFLNR

SEQ ID NO: 21481 - protein, 17 aa, Severe acute respiratory syndrome coronavirus 2
  REGION 1..17: note = Table B: HLA-DRB1*03:01L
DDNLIDSYFVVKRHTFS

SEQ ID NO: 21482 - protein, 14 aa, Severe acute respiratory syndrome coronavirus 2
  REGION 1..14: note = Table B: HLA-DRB1*03:01L HLA-DQA1*05:05-B1*03:19L HLA-DRB1*13:01L HLA-DPA1*01:03-B1*104:01L HLA-DQA1*05:05-B1*03:01L HLA-DRB1*07:01L
IDSYFVVKRHTFSN

SEQ ID NO: 21483 - protein, 16 aa, Severe acute respiratory syndrome coronavirus 2
  REGION 1..16: note = Table B: HLA-DRB1*03:01L HLA-DRB4*01:01L HLA-DPA1*01:03-B1*04:01L
GYHFRELGVVHNQDVN

SEQ ID NO: 21484 - protein, 11 aa, Severe acute respiratory syndrome coronavirus 2
  REGION 1..11: note = Table B: HLA-DRB1*03:01L HLA-DPA1*02:01-B1*13:01L
VYAADPAMHAA

SEQ ID NO: 21485 - protein, 13 aa, Severe acute respiratory syndrome coronavirus 2
  REGION 1..13: note = Table B: HLA-DRB1*03:01L
ADPAMHAASGNLL

SEQ ID NO: 21486 - protein, 12 aa, Severe acute respiratory syndrome coronavirus 2
  REGION 1..12: note = Table B: HLA-DRB1*03:01L HLA-DRB3*01:01L HLA-DRB1*16:01L
GNLLLDKRTTCF

SEQ ID NO: 21487 - protein, 16 aa, Severe acute respiratory syndrome coronavirus 2
  REGION 1..16: note = Table B: HLA-DRB1*03:01L
VSKGFFKEGSSVELKH

SEQ ID NO: 21488 - protein, 12 aa, Severe acute respiratory syndrome coronavirus 2
  REGION 1..12: note = Table B: HLA-DRB1*03:01L HLA-DRB1*08:01L HLA-DPA1*01:03-B1*04:01L HLA-DRB1*04:10L HLA-DRB3*01:01L HLA-DPA1*02:01-B1*13:01L HLA-DRB1*10:01L HLA-DRB1*08:03L
NNLDKSAGFPFN

SEQ ID NO: 21489 - protein, 16 aa, Severe acute respiratory syndrome coronavirus 2
  REGION 1..16: note = Table B: HLA-DRB1*03:01L HLA-DRB4*01:01L HLA-DRB1*09:01L HLA-DPA1*01:03-B1*02:01L HLA-DRB1*07:01L
GKARLYYDSMSYEDQD

SEQ ID NO: 21490 - protein, 15 aa, Severe acute respiratory syndrome coronavirus 2
  REGION 1..15: note = Table B: HLA-DRB1*03:01L HLA-DRB1*11:03L HLA-DRB1*14:54L HLA-DRB1*08:03L
TKRNVIPTITQMNLK

SEQ ID NO: 21491 - protein, 14 aa, Severe acute respiratory syndrome coronavirus 2
  REGION 1..14: note = Table B: HLA-DRB1*03:01L HLA-DRB1*11:02L HLA-DRB1*13:01L HLA-DRB1*08:02L HLA-DRB1*08:03L
YAISAKNRARTVAG

SEQ ID NO: 21492 - protein, 15 aa, Severe acute respiratory syndrome coronavirus 2
  REGION 1..15: note = Table B: HLA-DRB1*03:01L HLA-DRB1*14:02L HLA-DPA1*01:03-B1*104:01L HLA-DPA1*01:02-B1*04:01L
HQKLLKSIAATRGAT

SEQ ID NO: 21493 - protein, 15 aa, Severe acute respiratory syndrome coronavirus 2
  REGION 1..15: note = Table B: HLA-DRB1*03:01L HLA-DRB1*11:02L HLA-DPA1*01:03-B1*04:02L HLA-DRB1*08:02L HLA-DRB1*08:03L
LKSIAATRGATVVIG

SEQ ID NO: 21494 - protein, 16 aa, Severe acute respiratory syndrome coronavirus 2
  REGION 1..16: note = Table B: HLA-DRB1*03:01L
DDYVYLPYPDPSRILG

SEQ ID NO: 21495 - protein, 17 aa, Severe acute respiratory syndrome coronavirus 2
  REGION 1..17: note = Table B: HLA-DRB1*03:01L
TSRYWEPEFYEAMYTPH

SEQ ID NO: 21496 - protein, 16 aa, Severe acute respiratory syndrome coronavirus 2
  REGION 1..16: note = Table B: HLA-DRB1*03:01L HLA-DRB1*15:01L
EPEFYEAMYTPHTVLQ

SEQ ID NO: 21497 - protein, 16 aa, Severe acute respiratory syndrome coronavirus 2
  REGION 1..16: note = Table B: HLA-DRB1*03:01L
ERLKLFAAETLKATEE

SEQ ID NO: 21498 - protein, 15 aa, Severe acute respiratory syndrome coronavirus 2
  REGION 1..15: note = Table B: HLA-DRB1*03:01L HLA-DRB1*11:02L
LKLFAAETLKATEET

SEQ ID NO: 21499 - protein, 13 aa, Severe acute respiratory syndrome coronavirus 2
  REGION 1..13: note = Table B: HLA-DRB1*03:01L HLA-DRB1*14:02L
GYRVTKNSKVQIG

SEQ ID NO: 21500 - protein, 15 aa, Severe acute respiratory syndrome coronavirus 2
  REGION 1..15: note = Table B: HLA-DRB1*03:01L HLA-DRB1*11:03L
RARVECFDKFKVNST

SEQ ID NO: 21501 - protein, 13 aa, Severe acute respiratory syndrome coronavirus 2
  REGION 1..13: note = Table B: HLA-DRB1*03:01L HLA-DRB1*11:02L HLA-DRB1*11:04L HLA-DRB1*08:01L HLA-DPA1*01:03-B1*04:01L HLA-DRB3*01:01L HLA-DRB1*07:01L
DIVVFDEISMATN

SEQ ID NO: 21502 - protein, 11 aa, Severe acute respiratory syndrome coronavirus 2
  REGION 1..11: note = Table B: HLA-DRB1*03:01L HLA-DRB1*11:03L
LVYDNKLKAHK

SEQ ID NO: 21503 - protein, 14 aa, Severe acute respiratory syndrome coronavirus 2
  REGION 1..14: note = Table B: HLA-DRB1*03:01L
EFLTRNPAWRKAVF

SEQ ID NO: 21504 - protein, 13 aa, Severe acute respiratory syndrome coronavirus 2
  REGION 1..13: note = Table B: HLA-DRB1*03:01L HLA-DQA1*01:01-B1*05:01L HLA-DRB4*02:01NL HLA-DRB1*13:01L HLA-DRB4*01:01L HLA-DPA1*01:03-B1*04:01L HLA-DPA1*01:03-B1*04:02L HLA-DRB3*01:01L HLA-DPA1*02:01-B1*13:01L
  REGION 1..13: note = CONT. FROM ABOVE: HLA-DPA1*01:03-B1*02:01L HLA-DPA1*01:03-B1*104 :01L HLA-DPA1*01:02-B1*04:01L HLA-DRB1*08:02L
ISPYNSQNAVASK

SEQ ID NO: 21505 - protein, 14 aa, Severe acute respiratory syndrome coronavirus 2
  REGION 1..14: note = Table B: HLA-DRB1*03:01L HLA-DRB1*11:02L HLA-DQA1*01:01-B1*05:01L HLA-DRB5*01:01L HLA-DRB1*13:01L HLA-DPA1*01:03-B1*04:01L HLA-DPA1*01:03-B1*04:02L HLA-DPA1*01:03-B1*02:01L HLA-DRB1*08:02L
ASKILGLPTQTVDS

SEQ ID NO: 21506 - protein, 16 aa, Severe acute respiratory syndrome coronavirus 2
  REGION 1..16: note = Table B: HLA-DRB1*03:01L HLA-DRB1*08:02L HLA-DRB1*15:01L
DKLQFTSLEIPRRNVA

SEQ ID NO: 21507 - protein, 16 aa, Severe acute respiratory syndrome coronavirus 2
  REGION 1..16: note = Table B: HLA-DRB1*03:01L HLA-DPA1*01:03-B1*04:02L HLA-DRB1*08:02L HLA-DRB1*15:01L
IPRRNVATLQAENVTG

SEQ ID NO: 21508 - protein, 11 aa, Severe acute respiratory syndrome coronavirus 2
  REGION 1..11: note = Table B: HLA-DRB1*03:01L HLA-DRB1*14:02L HLA-DPA1*01:03-B1*04:01L HLA-DQA1*02:01-B1*03:03L
DIPGIPKDMTY

SEQ ID NO: 21509 - protein, 15 aa, Severe acute respiratory syndrome coronavirus 2
  REGION 1..15: note = Table B: HLA-DRB1*03:01L
GFDYVYNPFMIDVQQ

SEQ ID NO: 21510 - protein, 15 aa, Severe acute respiratory syndrome coronavirus 2
  REGION 1..15: note = Table B: HLA-DRB1*03:01L HLA-DRB1*13:01L
YNLWNTFTRLQSLEN

SEQ ID NO: 21511 - protein, 14 aa, Severe acute respiratory syndrome coronavirus 2
  REGION 1..14: note = Table B: HLA-DRB1*03:01L
WNTFTRLQSLENVA

SEQ ID NO: 21512 - protein, 15 aa, Severe acute respiratory syndrome coronavirus 2
  REGION 1..15: note = Table B: HLA-DRB1*03:01L HLA-DRB1*11:02L HLA-DQA1*01:01-B1*05:01L HLA-DRB1*13:01L HLA-DQA1*05:05-B1*03:116L HLA-DRB1*08:02L
LQSLENVAFNVVNKG

SEQ ID NO: 21513 - protein, 13 aa, Severe acute respiratory syndrome coronavirus 2
  REGION 1..13: note = Table B: HLA-DRB1*03:01L HLA-DRB1*11:02L HLA-DQA1*05:05-B1*03:116L HLA-DPA1*01:03-B1*02:01L HLA-DRB1*15:01L
NTVYTKVDGVDVE

SEQ ID NO: 21514 - protein, 19 aa, Severe acute respiratory syndrome coronavirus 2
  REGION 1..19: note = Table B: HLA-DRB1*03:01L HLA-DQA1*05:05-B1*03:19L HLA-DQA1*05:05-B1*03:116L
LPVNVAFELWAKRNIKPVP

SEQ ID NO: 21515 - protein, 11 aa, Severe acute respiratory syndrome coronavirus 2
  REGION 1..11: note = Table B: HLA-DRB1*03:01L HLA-DRB1*11:02L HLA-DQA1*01-B1*05L HLA-DRB1*15:03L
DIAANTVIWDY

SEQ ID NO: 21516 - protein, 14 aa, Severe acute respiratory syndrome coronavirus 2
  REGION 1..14: note = Table B: HLA-DRB1*03:01L HLA-DPA1*01:03-B1*104:01L HLA-DRB1*08:02L
NGVLITEGSVKGLQ

SEQ ID NO: 21517 - protein, 16 aa, Severe acute respiratory syndrome coronavirus 2
  REGION 1..16: note = Table B: HLA-DRB1*03:01L HLA-DRB1*13:01L HLA-DPA1*01:03-B1*104:01L HLA-DRB1*10:01L HLA-DQA1*01:03-B1*06:01L
VKTQFNYYKKVDGVVQ

SEQ ID NO: 21518 - protein, 16 aa, Severe acute respiratory syndrome coronavirus 2
  REGION 1..16: note = Table B: HLA-DRB1*03:01L
IDLLLDDFVEIIKSQD

SEQ ID NO: 21519 - protein, 13 aa, Severe acute respiratory syndrome coronavirus 2
  REGION 1..13: note = Table B: HLA-DRB1*03:01L HLA-DRB1*11:02L HLA-DQA1*01:01-B1*05:01L HLA-DRB1*13:01L HLA-DPA1*01:03-B1*04:01L HLA-DPA1*01:03-B1*04:02L HLA-DRB3*01:01L HLA-DPA1*01:03-B1*02:01L HLA-DRB1*08:02L
  REGION 1..13: note = CONT. FROM ABOVE: HLA-DRB1*15:01L
VEIIKSQDLSVVS

SEQ ID NO: 21520 - protein, 12 aa, Severe acute respiratory syndrome coronavirus 2
  REGION 1..12: note = Table B: HLA-DRB1*03:01L HLA-DRB1*11:02L
IFWRNTNPIQLS

SEQ ID NO: 21521 - protein, 16 aa, Severe acute respiratory syndrome coronavirus 2
  REGION 1..16: note = Table B: HLA-DRB1*03:01L HLA-DRB1*13:01L
LSLLSKGRLIIRENNR

SEQ ID NO: 21522 - protein, 13 aa, Severe acute respiratory syndrome coronavirus 2
  REGION 1..13: note = Table B: HLA-DRB1*03:01L HLA-DRB1*11:02L HLA-DRB1*13:01L HLA-DPA1*01:03-B1*02:01L HLA-DRB1*08:02L
NRVVISSDVLVNN

SEQ ID NO: 21523 - protein, 14 aa, Severe acute respiratory syndrome coronavirus 2
  REGION 1..14: note = Table B: HLA-DRB1*03:01L HLA-DRB1*07:01L
FHAIHVSGTNGTKR

SEQ ID NO: 21524 - protein, 14 aa, Severe acute respiratory syndrome coronavirus 2
  REGION 1..14: note = Table B: HLA-DRB1*03:01L HLA-DRB1*07:01L
VYFASTEKSNIIRG

SEQ ID NO: 21525 - protein, 16 aa, Severe acute respiratory syndrome coronavirus 2
  REGION 1..16: note = Table B: HLA-DRB1*03:01L HLA-DRB1*11:02L HLA-DQA1*05:05-B1*03:116L
IIRGWIFGTTLDSKTQ

SEQ ID NO: 21526 - protein, 13 aa, Severe acute respiratory syndrome coronavirus 2
  REGION 1..13: note = Table B: HLA-DRB1*03:01L HLA-DRB1*11:02L HLA-DRB1*11:01L HLA-DRB4*01:01L HLA-DRB1*09:01L HLA-DRB3*01:01L HLA-DRB1*07:01L HLA-DRB1*08:03L
SLLIVNNATNVVI

SEQ ID NO: 21527 - protein, 15 aa, Severe acute respiratory syndrome coronavirus 2
  REGION 1..15: note = Table B: HLA-DRB1*03:01L HLA-DRB1*11:02L
GVYYHKNNKSWMESE

SEQ ID NO: 21528 - protein, 16 aa, Severe acute respiratory syndrome coronavirus 2
  REGION 1..16: note = Table B: HLA-DRB1*03:01L HLA-DQA1*05:05-B1*03:116L HLA-DRB1*08:02L
ESEFRVYSSANNCTFE

SEQ ID NO: 21529 - protein, 13 aa, Severe acute respiratory syndrome coronavirus 2
  REGION 1..13: note = Table B: HLA-DRB1*03:01L
NITRFQTLLALHR

SEQ ID NO: 21530 - protein, 15 aa, Severe acute respiratory syndrome coronavirus 2
  REGION 1..15: note = Table B: HLA-DRB1*03:01L HLA-DRB1*11:02L HLA-DRB3*01:01L
TFLLKYNENGTITDA

SEQ ID NO: 21531 - protein, 14 aa, Severe acute respiratory syndrome coronavirus 2
  REGION 1..14: note = Table B: HLA-DRB1*03:01L HLA-DRB1*11:02L HLA-DRB1*08:02L
VIAWNSNNLDSKVG

SEQ ID NO: 21532 - protein, 15 aa, Severe acute respiratory syndrome coronavirus 2
  REGION 1..15: note = Table B: HLA-DRB1*03:01L HLA-DQA1*05:05-B1*03:116L
ISTEIYQAGSTPCNG

SEQ ID NO: 21533 - protein, 16 aa, Severe acute respiratory syndrome coronavirus 2
  REGION 1..16: note = Table B: HLA-DRB1*03:01L HLA-DRB1*11:02L HLA-DRB4*01:01L HLA-DPA1*01:03-B1*04:01L HLA-DRB1*04:10L HLA-DRB1*09:01L HLA-DRB1*07:01L
LPFQQFGRDIADTTDA

SEQ ID NO: 21534 - protein, 15 aa, Severe acute respiratory syndrome coronavirus 2
  REGION 1..15: note = Table B: HLA-DRB1*03:01L HLA-DRB1*11:02L
LQDVVNQNAQALNTL

SEQ ID NO: 21535 - protein, 15 aa, Severe acute respiratory syndrome coronavirus 2
  REGION 1..15: note = Table B: HLA-DRB1*03:01L HLA-DRB1*11:02L HLA-DQA1*01:01-B1*05:01L HLA-DPA1*01:03-B1*02:01L HLA-DRB1*08:02L HLA-DRB1*15:01L
NTLVKQLSSNFGAIS

SEQ ID NO: 21536 - protein, 16 aa, Severe acute respiratory syndrome coronavirus 2
  REGION 1..16: note = Table B: HLA-DRB1*03:01L HLA-DRB1*13:01L HLA-DRB4*01:01L HLA-DQA1*05:05-B1*03:116L
VTQQLIRAAEIRASAN

SEQ ID NO: 21537 - protein, 19 aa, Severe acute respiratory syndrome coronavirus 2
  REGION 1..19: note = Table B: HLA-DRB1*03:01L
APHGVVFLHVTYVPAQEKN

SEQ ID NO: 21538 - protein, 12 aa, Severe acute respiratory syndrome coronavirus 2
  REGION 1..12: note = Table B: HLA-DRB1*03:01L HLA-DRB1*14:01L HLA-DRB3*01:01L
AICHDGKAHFPR

SEQ ID NO: 21539 - protein, 13 aa, Severe acute respiratory syndrome coronavirus 2
  REGION 1..13: note = Table B: HLA-DRB1*03:01L
CKFDEDDSEPVLK

SEQ ID NO: 21540 - protein, 11 aa, Severe acute respiratory syndrome coronavirus 2
  REGION 1..11: note = Table B: HLA-DRB1*03:01L
EPVLKGVKLHY

SEQ ID NO: 21541 - protein, 16 aa, Severe acute respiratory syndrome coronavirus 2
  REGION 1..16: note = Table B: HLA-DRB1*03:01L
TSDYYQLYSTQLSTDT

SEQ ID NO: 21542 - protein, 16 aa, Severe acute respiratory syndrome coronavirus 2
  REGION 1..16: note = Table B: HLA-DRB1*03:01L
SDYYQLYSTQLSTDTG

SEQ ID NO: 21543 - protein, 13 aa, Severe acute respiratory syndrome coronavirus 2
  REGION 1..13: note = Table B: HLA-DRB1*03:01L
YNKIVDEPEEHVQ

SEQ ID NO: 21544 - protein, 14 aa, Severe acute respiratory syndrome coronavirus 2
  REGION 1..14: note = Table B: HLA-DRB1*03:01L HLA-DRB1*11:02L
TNILLNVPLHGTIL

SEQ ID NO: 21545 - protein, 14 aa, Severe acute respiratory syndrome coronavirus 2
  REGION 1..14: note = Table B: HLA-DRB1*03:01L HLA-DRB1*11:02L HLA-DRB4*02:01NL HLA-DRB1*13:01L HLA-DPA1*01:03-B1*04:01L HLA-DPA1*01:03-B1*04:02L HLA-DPA1*01:03-B1*02:01L HLA-DPA1*01:03-B1*104:01L HLA-DRB1*08:02L HLA-DRB1*15:01L
LSYYKLGASQRVAG

SEQ ID NO: 21546 - protein, 16 aa, Severe acute respiratory syndrome coronavirus 2
  REGION 1..16: note = Table B: HLA-DRB1*03:01L HLA-DQA1*05:05-B1*03:116L
SYYKLGASQRVAGDSG

SEQ ID NO: 21547 - protein, 17 aa, Severe acute respiratory syndrome coronavirus 2
  REGION 1..17: note = Table B: HLA-DRB1*03:01L HLA-DRB1*14:02L
APLIELCVDEAGSKSPI

SEQ ID NO: 21548 - protein, 16 aa, Severe acute respiratory syndrome coronavirus 2
  REGION 1..16: note = Table B: HLA-DRB1*03:01L
FTALTQHGKEDLKFPR

SEQ ID NO: 21549 - protein, 15 aa, Severe acute respiratory syndrome coronavirus 2
  REGION 1..15: note = Table B: HLA-DRB1*03:01L HLA-DRB1*11:02L HLA-DQA1*01:01-B1*05:01L HLA-DQA1*01-B1*05L HLA-DQA1*05:01-B1*02:01L HLA-DRB1*13:01L HLA-DRB1*09:01L HLA-DPA1*01:03-B1*04:02L HLA-DRB1*12:02L HLA-DRB3*01:01L
  REGION 1..15: note = CONT. FROM ABOVE: HLA-DPA1*01:03-B1*02:01L HLA-DPA1*01:03-B1*104 :01L HLA-DPA1*01:02-B1*04:01L HLA-DRB1*07:01L HLA-DRB1*08:02L HL A-DRB1*15:01L
LPKGFYAEGSRGGSQ

SEQ ID NO: 21550 - protein, 16 aa, Severe acute respiratory syndrome coronavirus 2
  REGION 1..16: note = Table B: HLA-DRB1*03:01L HLA-DRB1*14:01L HLA-DRB1*11:04L HLA-DRB3*01:01L
KPRQKRTATKAYNVTQ

SEQ ID NO: 21551 - protein, 16 aa, Severe acute respiratory syndrome coronavirus 2
  REGION 1..16: note = Table B: HLA-DRB1*03:01L
TQGNFGDQELIRQGTD

SEQ ID NO: 21552 - protein, 13 aa, Severe acute respiratory syndrome coronavirus 2
  REGION 1..13: note = Table B: HLA-DRB1*14:01L
VGEIPVAYRKVLL

SEQ ID NO: 21553 - protein, 13 aa, Severe acute respiratory syndrome coronavirus 2
  REGION 1..13: note = Table B: HLA-DRB1*14:01L
GEIPVAYRKVLLR

SEQ ID NO: 21554 - protein, 13 aa, Severe acute respiratory syndrome coronavirus 2
  REGION 1..13: note = Table B: HLA-DRB1*14:01L HLA-DRB1*08:01L HLA-DRB1*12:01L HLA-DRB3*01:01L HLA-DRB1*15:03L
EIPVAYRKVLLRK

SEQ ID NO: 21555 - protein, 15 aa, Severe acute respiratory syndrome coronavirus 2
  REGION 1..15: note = Table B: HLA-DRB1*14:01L HLA-DRB1*11:04L HLA-DRB1*11:01L HLA-DRB3*01:01L HLA-DRB1*15:03L
RKVLLRKNGNKGAGG

SEQ ID NO: 21556 - protein, 16 aa, Severe acute respiratory syndrome coronavirus 2
  REGION 1..16: note = Table B: HLA-DRB1*14:01L HLA-DRB1*15:03L
IKDLLARAGKASCTLS

SEQ ID NO: 21557 - protein, 14 aa, Severe acute respiratory syndrome coronavirus 2
  REGION 1..14: note = Table B: HLA-DRB1*14:01L HLA-DRB3*01:01L HLA-DRB1*04:08L HLA-DRB1*15:03L
KTIQPRVEKKKLDG

SEQ ID NO: 21558 - protein, 14 aa, Severe acute respiratory syndrome coronavirus 2
  REGION 1..14: note = Table B: HLA-DRB1*14:01L HLA-DRB1*08:01L HLA-DRB1*12:01L HLA-DRB1*16:01L HLA-DRB1*04:08L HLA-DQA1*02:01-B1*03:03L HLA-DRB1*15:03L
TILRKGGRTIAFGG

SEQ ID NO: 21559 - protein, 11 aa, Severe acute respiratory syndrome coronavirus 2
  REGION 1..11: note = Table B: HLA-DRB1*14:01L
NIGCNHTGVVG

SEQ ID NO: 21560 - protein, 10 aa, Severe acute respiratory syndrome coronavirus 2
  REGION 1..10: note = Table B: HLA-DRB1*14:01L HLA-DPA1*01:02-B1*04:01L
LEILQKEKVN

SEQ ID NO: 21561 - protein, 10 aa, Severe acute respiratory syndrome coronavirus 2
  REGION 1..10: note = Table B: HLA-DRB1*14:01L
ILQKEKVNIN

SEQ ID NO: 21562 - protein, 12 aa, Severe acute respiratory syndrome coronavirus 2
  REGION 1..12: note = Table B: HLA-DRB1*14:01L HLA-DRB1*12:01L HLA-DRB1*16:01L
KVNINIVGDFKL

SEQ ID NO: 21563 - protein, 11 aa, Severe acute respiratory syndrome coronavirus 2
  REGION 1..11: note = Table B: HLA-DRB1*14:01L
INIVGDFKLNE

SEQ ID NO: 21564 - protein, 12 aa, Severe acute respiratory syndrome coronavirus 2
  REGION 1..12: note = Table B: HLA-DRB1*14:01L HLA-DRB1*04:08L
ARVVRSIFSRTL

SEQ ID NO: 21565 - protein, 12 aa, Severe acute respiratory syndrome coronavirus 2
  REGION 1..12: note = Table B: HLA-DRB1*14:01L
QNSVRVLQKAAI

SEQ ID NO: 21566 - protein, 13 aa, Severe acute respiratory syndrome coronavirus 2
  REGION 1..13: note = Table B: HLA-DRB1*14:01L HLA-DRB1*14:17L HLA-DRB1*16:01L
TGGVVQLTSQWLT

SEQ ID NO: 21567 - protein, 11 aa, Severe acute respiratory syndrome coronavirus 2
  REGION 1..11: note = Table B: HLA-DRB1*14:01L HLA-DRB1*08:01L
GQIVTCAKEIK

SEQ ID NO: 21568 - protein, 14 aa, Severe acute respiratory syndrome coronavirus 2
  REGION 1..14: note = Table B: HLA-DRB1*14:01L HLA-DRB1*08:01L HLA-DRB1*11:01L
VEAPLVGTPVCING

SEQ ID NO: 21569 - protein, 15 aa, Severe acute respiratory syndrome coronavirus 2
  REGION 1..15: note = Table B: HLA-DRB1*14:01L
LDERIDKVLNEKCSA

SEQ ID NO: 21570 - protein, 12 aa, Severe acute respiratory syndrome coronavirus 2
  REGION 1..12: note = Table B: HLA-DRB1*14:01L HLA-DRB1*14:54L
ADIVEEAKKVKP

SEQ ID NO: 21571 - protein, 13 aa, Severe acute respiratory syndrome coronavirus 2
  REGION 1..13: note = Table B: HLA-DRB1*14:01L HLA-DRB1*08:01L HLA-DPA1*03:01-B1*105:01L
VNAANVYLKHGGG

SEQ ID NO: 21572 - protein, 11 aa, Severe acute respiratory syndrome coronavirus 2
  REGION 1..11: note = Table B: HLA-DRB1*14:01L HLA-DRB1*14:02L HLA-DPA1*01:03-B1*04:01L HLA-DRB1*09:01L HLA-DPA1*01:03-B1*04:02L HLA-DRB1*12:01L HLA-DRB1*10:01L HLA-DRB1*08:03L
SAYENFNQHEV

SEQ ID NO: 21573 - protein, 12 aa, Severe acute respiratory syndrome coronavirus 2
  REGION 1..12: note = Table B: HLA-DRB1*14:01L
VKPFITESKPSV

SEQ ID NO: 21574 - protein, 15 aa, Severe acute respiratory syndrome coronavirus 2
  REGION 1..15: note = Table B: HLA-DRB1*14:01L
HPDSATLVSDIDITF

SEQ ID NO: 21575 - protein, 13 aa, Severe acute respiratory syndrome coronavirus 2
  REGION 1..13: note = Table B: HLA-DRB1*14:01L
IVGDVVQEGVLTA

SEQ ID NO: 21576 - protein, 12 aa, Severe acute respiratory syndrome coronavirus 2
  REGION 1..12: note = Table B: HLA-DRB1*14:01L HLA-DRB1*14:54L
TAVVIPTKKAGG

SEQ ID NO: 21577 - protein, 14 aa, Severe acute respiratory syndrome coronavirus 2
  REGION 1..14: note = Table B: HLA-DRB1*14:01L HLA-DRB1*16:01L HLA-DRB1*15:03L
GTTEMLAKALRKVP

SEQ ID NO: 21578 - protein, 11 aa, Severe acute respiratory syndrome coronavirus 2
  REGION 1..11: note = Table B: HLA-DRB1*14:01L
PSIISNEKQEI

SEQ ID NO: 21579 - protein, 11 aa, Severe acute respiratory syndrome coronavirus 2
  REGION 1..11: note = Table B: HLA-DRB1*14:01L
GTVSWNLREML

SEQ ID NO: 21580 - protein, 12 aa, Severe acute respiratory syndrome coronavirus 2
  REGION 1..12: note = Table B: HLA-DRB1*14:01L
TVSWNLREMLAH

SEQ ID NO: 21581 - protein, 13 aa, Severe acute respiratory syndrome coronavirus 2
  REGION 1..13: note = Table B: HLA-DRB1*14:01L
STIQRKYKGIKIQ

SEQ ID NO: 21582 - protein, 11 aa, Severe acute respiratory syndrome coronavirus 2
  REGION 1..11: note = Table B: HLA-DRB1*14:01L HLA-DRB1*08:01L
YFYTSKTTVAS

SEQ ID NO: 21583 - protein, 12 aa, Severe acute respiratory syndrome coronavirus 2
  REGION 1..12: note = Table B: HLA-DRB1*14:01L
LNLEEAARYMRS

SEQ ID NO: 21584 - protein, 12 aa, Severe acute respiratory syndrome coronavirus 2
  REGION 1..12: note = Table B: HLA-DRB1*14:01L HLA-DRB1*08:01L
AARYMRSLKVPA

SEQ ID NO: 21585 - protein, 14 aa, Severe acute respiratory syndrome coronavirus 2
  REGION 1..14: note = Table B: HLA-DRB1*14:01L HLA-DPA1*02:01-B1*13:01L HLA-DPA1*03:01-B1*105:01L
DNLKTLLSLREVRT

SEQ ID NO: 21586 - protein, 12 aa, Severe acute respiratory syndrome coronavirus 2
  REGION 1..12: note = Table B: HLA-DRB1*14:01L
SALNHTKKWKYP

SEQ ID NO: 21587 - protein, 12 aa, Severe acute respiratory syndrome coronavirus 2
  REGION 1..12: note = Table B: HLA-DRB1*14:01L HLA-DQA1*05:01-B1*02:01L HLA-DRB1*12:01L
ATALLTLQQIEL

SEQ ID NO: 21588 - protein, 12 aa, Severe acute respiratory syndrome coronavirus 2
  REGION 1..12: note = Table B: HLA-DRB1*14:01L HLA-DRB1*15:03L
LGDVRETMSYLF

SEQ ID NO: 21589 - protein, 12 aa, Severe acute respiratory syndrome coronavirus 2
  REGION 1..12: note = Table B: HLA-DRB1*14:01L HLA-DRB1*08:01L
HANLDSCKRVLN

SEQ ID NO: 21590 - protein, 13 aa, Severe acute respiratory syndrome coronavirus 2
  REGION 1..13: note = Table B: HLA-DRB1*14:01L
GVEAVMYMGTLSY

SEQ ID NO: 21591 - protein, 13 aa, Severe acute respiratory syndrome coronavirus 2
  REGION 1..13: note = Table B: HLA-DRB1*14:01L HLA-DRB1*08:01L HLA-DRB1*12:01L
APPAQYELKHGTF

SEQ ID NO: 21592 - protein, 13 aa, Severe acute respiratory syndrome coronavirus 2
  REGION 1..13: note = Table B: HLA-DRB1*14:01L HLA-DRB1*08:01L HLA-DQA1*03:01-B1*03:02L
PPAQYELKHGTFT

SEQ ID NO: 21593 - protein, 13 aa, Severe acute respiratory syndrome coronavirus 2
  REGION 1..13: note = Table B: HLA-DRB1*14:01L
GALLTKSSEYKGP

SEQ ID NO: 21594 - protein, 16 aa, Severe acute respiratory syndrome coronavirus 2
  REGION 1..16: note = Table B: HLA-DRB1*14:01L
DVFYKENSYTTTIKPV

SEQ ID NO: 21595 - protein, 13 aa, Severe acute respiratory syndrome coronavirus 2
  REGION 1..13: note = Table B: HLA-DRB1*14:01L HLA-DPA1*02:01-B1*13:01L
LTGYKKPASRELK

SEQ ID NO: 21596 - protein, 13 aa, Severe acute respiratory syndrome coronavirus 2
  REGION 1..13: note = Table B: HLA-DRB1*14:01L
KDVLECNVKTTEV

SEQ ID NO: 21597 - protein, 13 aa, Severe acute respiratory syndrome coronavirus 2
  REGION 1..13: note = Table B: HLA-DRB1*14:01L HLA-DQA1*01:03-B1*06:01L
DVLECNVKTTEVV

SEQ ID NO: 21598 - protein, 13 aa, Severe acute respiratory syndrome coronavirus 2
  REGION 1..13: note = Table B: HLA-DRB1*14:01L HLA-DRB1*14:54L HLA-DPA1*01:02-B1*04:01L HLA-DRB1*04:08L
VDNSSLTIKKPNE

SEQ ID NO: 21599 - protein, 12 aa, Severe acute respiratory syndrome coronavirus 2
  REGION 1..12: note = Table B: HLA-DRB1*14:01L
LGLKTLATHGLA

SEQ ID NO: 21600 - protein, 13 aa, Severe acute respiratory syndrome coronavirus 2
  REGION 1..13: note = Table B: HLA-DRB1*14:01L HLA-DRB1*08:01L
SVPWDTIANYAKP

SEQ ID NO: 21601 - protein, 12 aa, Severe acute respiratory syndrome coronavirus 2
  REGION 1..12: note = Table B: HLA-DRB1*14:01L
TTIAKNTVKSVG

SEQ ID NO: 21602 - protein, 13 aa, Severe acute respiratory syndrome coronavirus 2
  REGION 1..13: note = Table B: HLA-DRB1*14:01L
KNTVKSVGKFCLE

SEQ ID NO: 21603 - protein, 13 aa, Severe acute respiratory syndrome coronavirus 2
  REGION 1..13: note = Table B: HLA-DRB1*14:01L
VARDLSLQFKRPI

SEQ ID NO: 21604 - protein, 12 aa, Severe acute respiratory syndrome coronavirus 2
  REGION 1..12: note = Table B: HLA-DRB1*14:01L
RDLSLQFKRPIN

SEQ ID NO: 21605 - protein, 14 aa, Severe acute respiratory syndrome coronavirus 2
  REGION 1..14: note = Table B: HLA-DRB1*14:01L HLA-DRB3*01:01L
QKTYERHSLSHFVN

SEQ ID NO: 21606 - protein, 13 aa, Severe acute respiratory syndrome coronavirus 2
  REGION 1..13: note = Table B: HLA-DRB1*14:01L
LDNLRANNTKGSL

SEQ ID NO: 21607 - protein, 10 aa, Severe acute respiratory syndrome coronavirus 2
  REGION 1..10: note = Table B: HLA-DRB1*14:01L
IVFDGKSKCE

SEQ ID NO: 21608 - protein, 12 aa, Severe acute respiratory syndrome coronavirus 2
  REGION 1..12: note = Table B: HLA-DRB1*14:01L
NVPMEKLKTLVA

SEQ ID NO: 21609 - protein, 12 aa, Severe acute respiratory syndrome coronavirus 2
  REGION 1..12: note = Table B: HLA-DRB1*14:01L HLA-DRB1*15:03L
AELAKNVSLDNV

SEQ ID NO: 21610 - protein, 10 aa, Severe acute respiratory syndrome coronavirus 2
  REGION 1..10: note = Table B: HLA-DRB1*14:01L HLA-DQA1*02:01-B1*03:03L HLA-DRB1*15:03L
FISAARQGFV

SEQ ID NO: 21611 - protein, 13 aa, Severe acute respiratory syndrome coronavirus 2
  REGION 1..13: note = Table B: HLA-DRB1*14:01L HLA-DRB1*15:03L
HINAQVAKSHNIA

SEQ ID NO: 21612 - protein, 13 aa, Severe acute respiratory syndrome coronavirus 2
  REGION 1..13: note = Table B: HLA-DRB1*14:01L HLA-DRB1*08:01L
KQIRSAAKKNNLP

SEQ ID NO: 21613 - protein, 13 aa, Severe acute respiratory syndrome coronavirus 2
  REGION 1..13: note = Table B: HLA-DRB1*14:01L HLA-DRB1*08:01L
QIRSAAKKNNLPF

SEQ ID NO: 21614 - protein, 11 aa, Severe acute respiratory syndrome coronavirus 2
  REGION 1..11: note = Table B: HLA-DRB1*14:01L HLA-DPA1*01:02-B1*04:01L HLA-DRB1*16:01L HLA-DRB1*15:03L
IVNNWLKQLIK

SEQ ID NO: 21615 - protein, 12 aa, Severe acute respiratory syndrome coronavirus 2
  REGION 1..12: note = Table B: HLA-DRB1*14:01L
NNWLKQLIKVTL

SEQ ID NO: 21616 - protein, 14 aa, Severe acute respiratory syndrome coronavirus 2
  REGION 1..14: note = Table B: HLA-DRB1*14:01L HLA-DRB1*12:01L HLA-DRB1*15:03L
TRDIASTDTCFANK

SEQ ID NO: 21617 - protein, 14 aa, Severe acute respiratory syndrome coronavirus 2
  REGION 1..14: note = Table B: HLA-DRB1*14:01L HLA-DRB1*11:04L HLA-DRB1*11:01L HLA-DRB1*12:01L HLA-DRB3*01:01L HLA-DRB1*15:03L
RDIASTDTCFANKH

SEQ ID NO: 21618 - protein, 11 aa, Severe acute respiratory syndrome coronavirus 2
  REGION 1..11: note = Table B: HLA-DRB1*14:01L HLA-DQA1*03:01-B1*03:02L
DTWFSQRGGSY

SEQ ID NO: 21619 - protein, 10 aa, Severe acute respiratory syndrome coronavirus 2
  REGION 1..10: note = Table B: HLA-DRB1*14:01L
LHFLPRVFSA

SEQ ID NO: 21620 - protein, 12 aa, Severe acute respiratory syndrome coronavirus 2
  REGION 1..12: note = Table B: HLA-DRB1*14:01L HLA-DPA1*02:01-B1*13:01L
VAYESLRPDTRY

SEQ ID NO: 21621 - protein, 12 aa, Severe acute respiratory syndrome coronavirus 2
  REGION 1..12: note = Table B: HLA-DRB1*14:01L HLA-DRB1*12:01L HLA-DRB1*16:01L HLA-DRB1*15:03L
TPLIQPIGALDI

SEQ ID NO: 21622 - protein, 12 aa, Severe acute respiratory syndrome coronavirus 2
  REGION 1..12: note = Table B: HLA-DRB1*14:01L HLA-DPA1*01:03-B1*04:01L HLA-DPA1*01:03-B1*04:02L HLA-DRB1*12:01L
VSFLAHIQWMVM

SEQ ID NO: 21623 - protein, 12 aa, Severe acute respiratory syndrome coronavirus 2
  REGION 1..12: note = Table B: HLA-DRB1*14:01L HLA-DRB1*12:01L HLA-DPA1*01:02-B1*04:01L HLA-DRB1*16:01L HLA-DRB1*15:03L
KEMYLKLRSDVL

SEQ ID NO: 21624 - protein, 11 aa, Severe acute respiratory syndrome coronavirus 2
  REGION 1..11: note = Table B: HLA-DRB1*14:01L
LPLTQYNRYLA

SEQ ID NO: 21625 - protein, 10 aa, Severe acute respiratory syndrome coronavirus 2
  REGION 1..10: note = Table B: HLA-DRB1*14:01L HLA-DRB1*15:03L
LALYNKYKYF

SEQ ID NO: 21626 - protein, 18 aa, Severe acute respiratory syndrome coronavirus 2
  REGION 1..18: note = Table B: HLA-DRB1*14:01L
QPPQTSITSAVLQSGFRK

SEQ ID NO: 21627 - protein, 12 aa, Severe acute respiratory syndrome coronavirus 2
  REGION 1..12: note = Table B: HLA-DRB1*14:01L HLA-DRB1*15:03L
TSAVLQSGFRKM

SEQ ID NO: 21628 - protein, 11 aa, Severe acute respiratory syndrome coronavirus 2
  REGION 1..11: note = Table B: HLA-DRB1*14:01L
DDVVYCPRHVI

SEQ ID NO: 21629 - protein, 12 aa, Severe acute respiratory syndrome coronavirus 2
  REGION 1..12: note = Table B: HLA-DRB1*14:01L
EDLLIRKSNHNF

SEQ ID NO: 21630 - protein, 10 aa, Severe acute respiratory syndrome coronavirus 2
  REGION 1..10: note = Table B: HLA-DRB1*14:01L
LIRKSNHNFL

SEQ ID NO: 21631 - protein, 14 aa, Severe acute respiratory syndrome coronavirus 2
  REGION 1..14: note = Table B: HLA-DRB1*14:01L HLA-DRB1*11:04L HLA-DPA1*03:01-B1*105:01L HLA-DQA1*05:05-B1*03:01L
QDHVDILGPLSAQT

SEQ ID NO: 21632 - protein, 12 aa, Severe acute respiratory syndrome coronavirus 2
  REGION 1..12: note = Table B: HLA-DRB1*14:01L
GVTFQSAVKRTI

SEQ ID NO: 21633 - protein, 11 aa, Severe acute respiratory syndrome coronavirus 2
  REGION 1..11: note = Table B: HLA-DRB1*14:01L
RTIKGTHHWLL

SEQ ID NO: 21634 - protein, 12 aa, Severe acute respiratory syndrome coronavirus 2
  REGION 1..12: note = Table B: HLA-DRB1*14:01L HLA-DRB1*12:01L HLA-DRB1*15:03L
FAMMFVKHKHAF

SEQ ID NO: 21635 - protein, 11 aa, Severe acute respiratory syndrome coronavirus 2
  REGION 1..11: note = Table B: HLA-DRB1*14:01L HLA-DPA1*01:03-B1*104:01L HLA-DRB1*15:03L
MVDTSLSGFKL

SEQ ID NO: 21636 - protein, 15 aa, Severe acute respiratory syndrome coronavirus 2
  REGION 1..15: note = Table B: HLA-DRB1*14:01L HLA-DRB1*12:01L
LSGFKLKDCVMYASA

SEQ ID NO: 21637 - protein, 11 aa, Severe acute respiratory syndrome coronavirus 2
  REGION 1..11: note = Table B: HLA-DRB1*14:01L
VLTLVYKVYYG

SEQ ID NO: 21638 - protein, 13 aa, Severe acute respiratory syndrome coronavirus 2
  REGION 1..13: note = Table B: HLA-DRB1*14:01L
DSEVVLKKLKKSL

SEQ ID NO: 21639 - protein, 12 aa, Severe acute respiratory syndrome coronavirus 2
  REGION 1..12: note = Table B: HLA-DRB1*14:01L
AMTQMYKQARSE

SEQ ID NO: 21640 - protein, 12 aa, Severe acute respiratory syndrome coronavirus 2
  REGION 1..12: note = Table B: HLA-DRB1*14:01L
LNNIINNARDGC

SEQ ID NO: 21641 - protein, 12 aa, Severe acute respiratory syndrome coronavirus 2
  REGION 1..12: note = Table B: HLA-DRB1*14:01L HLA-DRB1*15:03L
NIINNARDGCVP

SEQ ID NO: 21642 - protein, 12 aa, Severe acute respiratory syndrome coronavirus 2
  REGION 1..12: note = Table B: HLA-DRB1*14:01L
IINNARDGCVPL

SEQ ID NO: 21643 - protein, 15 aa, Severe acute respiratory syndrome coronavirus 2
  REGION 1..15: note = Table B: HLA-DRB1*14:01L HLA-DRB1*11:01L HLA-DRB1*08:02L
GTTFTYASALWEIQQ

SEQ ID NO: 21644 - protein, 13 aa, Severe acute respiratory syndrome coronavirus 2
  REGION 1..13: note = Table B: HLA-DRB1*14:01L
EISMDNSPNLAWP

SEQ ID NO: 21645 - protein, 11 aa, Severe acute respiratory syndrome coronavirus 2
  REGION 1..11: note = Table B: HLA-DRB1*14:01L
RANSAVKLQNN

SEQ ID NO: 21646 - protein, 15 aa, Severe acute respiratory syndrome coronavirus 2
  REGION 1..15: note = Table B: HLA-DRB1*14:01L
VLALLSDLQDLKWAR

SEQ ID NO: 21647 - protein, 12 aa, Severe acute respiratory syndrome coronavirus 2
  REGION 1..12: note = Table B: HLA-DRB1*14:01L
IKGLNNLNRGMV

SEQ ID NO: 21648 - protein, 11 aa, Severe acute respiratory syndrome coronavirus 2
  REGION 1..11: note = Table B: HLA-DRB1*14:01L
GLNNLNRGMVL

SEQ ID NO: 21649 - protein, 11 aa, Severe acute respiratory syndrome coronavirus 2
  REGION 1..11: note = Table B: HLA-DRB1*14:01L
LNNLNRGMVLG

SEQ ID NO: 21650 - protein, 11 aa, Severe acute respiratory syndrome coronavirus 2
  REGION 1..11: note = Table B: HLA-DRB1*14:01L HLA-DRB1*14:54L
GSLAATVRLQA

SEQ ID NO: 21651 - protein, 12 aa, Severe acute respiratory syndrome coronavirus 2
  REGION 1..12: note = Table B: HLA-DRB1*14:01L
YFVVKRHTFSNY

SEQ ID NO: 21652 - protein, 12 aa, Severe acute respiratory syndrome coronavirus 2
  REGION 1..12: note = Table B: HLA-DRB1*14:01L
MADLVYALRHFD

SEQ ID NO: 21653 - protein, 13 aa, Severe acute respiratory syndrome coronavirus 2
  REGION 1..13: note = Table B: HLA-DRB1*14:01L HLA-DRB1*11:04L HLA-DRB1*08:01L HLA-DRB1*15:01L
PDILRVYANLGER

SEQ ID NO: 21654 - protein, 13 aa, Severe acute respiratory syndrome coronavirus 2
  REGION 1..13: note = Table B: HLA-DRB1*14:01L
TKPYIKWDLLKYD

SEQ ID NO: 21655 - protein, 12 aa, Severe acute respiratory syndrome coronavirus 2
  REGION 1..12: note = Table B: HLA-DRB1*14:01L HLA-DRB1*16:01L
ERLKLFDRYFKY

SEQ ID NO: 21656 - protein, 12 aa, Severe acute respiratory syndrome coronavirus 2
  REGION 1..12: note = Table B: HLA-DRB1*14:01L
PFVVSTGYHFRE

SEQ ID NO: 21657 - protein, 13 aa, Severe acute respiratory syndrome coronavirus 2
  REGION 1..13: note = Table B: HLA-DRB1*14:01L HLA-DRB1*12:01L
QDVNLHSSRLSFK

SEQ ID NO: 21658 - protein, 11 aa, Severe acute respiratory syndrome coronavirus 2
  REGION 1..11: note = Table B: HLA-DRB1*14:01L
GNLLLDKRTTC

SEQ ID NO: 21659 - protein, 15 aa, Severe acute respiratory syndrome coronavirus 2
  REGION 1..15: note = Table B: HLA-DRB1*14:01L
EGSSVELKHFFFAQD

SEQ ID NO: 21660 - protein, 11 aa, Severe acute respiratory syndrome coronavirus 2
  REGION 1..11: note = Table B: HLA-DRB1*14:01L
NNLDKSAGFPF

SEQ ID NO: 21661 - protein, 11 aa, Severe acute respiratory syndrome coronavirus 2
  REGION 1..11: note = Table B: HLA-DRB1*14:01L
FPFNKWGKARL

SEQ ID NO: 21662 - protein, 12 aa, Severe acute respiratory syndrome coronavirus 2
  REGION 1..12: note = Table B: HLA-DRB1*14:01L HLA-DRB1*14:54L
DALFAYTKRNVI

SEQ ID NO: 21663 - protein, 13 aa, Severe acute respiratory syndrome coronavirus 2
  REGION 1..13: note = Table B: HLA-DRB1*14:01L
MPNMLRIMASLVL

SEQ ID NO: 21664 - protein, 15 aa, Severe acute respiratory syndrome coronavirus 2
  REGION 1..15: note = Table B: HLA-DRB1*14:01L
MLRIMASLVLARKHT

SEQ ID NO: 21665 - protein, 11 aa, Severe acute respiratory syndrome coronavirus 2
  REGION 1..11: note = Table B: HLA-DRB1*14:01L
ASLVLARKHTT

SEQ ID NO: 21666 - protein, 11 aa, Severe acute respiratory syndrome coronavirus 2
  REGION 1..11: note = Table B: HLA-DRB1*14:01L HLA-DRB1*11:01L HLA-DRB1*04:08L
EFYAYLRKHFS

SEQ ID NO: 21667 - protein, 11 aa, Severe acute respiratory syndrome coronavirus 2
  REGION 1..11: note = Table B: HLA-DRB1*14:01L HLA-DQA1*03:01-B1*03:02L HLA-DRB1*16:01L
KSVLYYQNNVF

SEQ ID NO: 21668 - protein, 10 aa, Severe acute respiratory syndrome coronavirus 2
  REGION 1..10: note = Table B: HLA-DRB1*14:01L HLA-DRB1*12:01L HLA-DRB1*16:01L HLA-DRB1*15:03L
VISTSHKLVL

SEQ ID NO: 21669 - protein, 11 aa, Severe acute respiratory syndrome coronavirus 2
  REGION 1..11: note = Table B: HLA-DRB1*14:01L
YYCKSHKPPIS

SEQ ID NO: 21670 - protein, 10 aa, Severe acute respiratory syndrome coronavirus 2
  REGION 1..10: note = Table B: HLA-DRB1*14:01L
VTKNSKVQIG

SEQ ID NO: 21671 - protein, 13 aa, Severe acute respiratory syndrome coronavirus 2
  REGION 1..13: note = Table B: HLA-DRB1*14:01L HLA-DRB1*16:01L HLA-DRB1*15:03L
PTLVPQEHYVRIT

SEQ ID NO: 21672 - protein, 12 aa, Severe acute respiratory syndrome coronavirus 2
  REGION 1..12: note = Table B: HLA-DRB1*14:01L HLA-DRB1*16:01L
LVPQEHYVRITG

SEQ ID NO: 21673 - protein, 12 aa, Severe acute respiratory syndrome coronavirus 2
  REGION 1..12: note = Table B: HLA-DRB1*14:01L
LPIDKCSRIIPA

SEQ ID NO: 21674 - protein, 12 aa, Severe acute respiratory syndrome coronavirus 2
  REGION 1..12: note = Table B: HLA-DRB1*14:01L
ARVECFDKFKVN

SEQ ID NO: 21675 - protein, 12 aa, Severe acute respiratory syndrome coronavirus 2
  REGION 1..12: note = Table B: HLA-DRB1*14:01L HLA-DRB1*14:54L
KGVITHDVSSAI

SEQ ID NO: 21676 - protein, 15 aa, Severe acute respiratory syndrome coronavirus 2
  REGION 1..15: note = Table B: HLA-DRB1*14:01L HLA-DRB3*01:01L
VGILCIMSDRDLYDK

SEQ ID NO: 21677 - protein, 13 aa, Severe acute respiratory syndrome coronavirus 2
  REGION 1..13: note = Table B: HLA-DRB1*14:01L HLA-DRB1*08:01L
FTSLEIPRRNVAT

SEQ ID NO: 21678 - protein, 16 aa, Severe acute respiratory syndrome coronavirus 2
  REGION 1..16: note = Table B: HLA-DRB1*14:01L
SLEIPRRNVATLQAEN

SEQ ID NO: 21679 - protein, 12 aa, Severe acute respiratory syndrome coronavirus 2
  REGION 1..12: note = Table B: HLA-DRB1*14:01L HLA-DRB1*08:01L
TGLFKDCSKVIT

SEQ ID NO: 21680 - protein, 13 aa, Severe acute respiratory syndrome coronavirus 2
  REGION 1..13: note = Table B: HLA-DRB1*14:01L
PTHLSVDTKFKTE

SEQ ID NO: 21681 - protein, 12 aa, Severe acute respiratory syndrome coronavirus 2
  REGION 1..12: note = Table B: HLA-DRB1*14:01L HLA-DRB1*15:03L
GFKMNYQVNGYP

SEQ ID NO: 21682 - protein, 14 aa, Severe acute respiratory syndrome coronavirus 2
  REGION 1..14: note = Table B: HLA-DRB1*14:01L
NLVAVPTGYVDTPN

SEQ ID NO: 21683 - protein, 13 aa, Severe acute respiratory syndrome coronavirus 2
  REGION 1..13: note = Table B: HLA-DRB1*14:01L HLA-DPA1*01:03-B1*04:01L HLA-DRB1*16:01L
SDRVVFVLWAHGF

SEQ ID NO: 21684 - protein, 12 aa, Severe acute respiratory syndrome coronavirus 2
  REGION 1..12: note = Table B: HLA-DRB1*14:01L HLA-DRB1*08:01L HLA-DPA1*01:03-B1*02:01L
FVLWAHGFELTS

SEQ ID NO: 21685 - protein, 11 aa, Severe acute respiratory syndrome coronavirus 2
  REGION 1..11: note = Table B: HLA-DRB1*14:01L
KYFVKIGPERT

SEQ ID NO: 21686 - protein, 14 aa, Severe acute respiratory syndrome coronavirus 2
  REGION 1..14: note = Table B: HLA-DRB1*14:01L HLA-DRB1*12:01L HLA-DRB3*01:01L HLA-DPA1*02:01-B1*13:01L HLA-DRB1*15:03L
SNHDLYCQVHGNAH

SEQ ID NO: 21687 - protein, 13 aa, Severe acute respiratory syndrome coronavirus 2
  REGION 1..13: note = Table B: HLA-DRB1*14:01L HLA-DQA1*05:01-B1*02:01L HLA-DRB1*12:01L HLA-DRB1*16:01L HLA-DQA1*01:03-B1*06:01L HLA-DRB1*15:03L
DAQPCSDKAYKIE

SEQ ID NO: 21688 - protein, 13 aa, Severe acute respiratory syndrome coronavirus 2
  REGION 1..13: note = Table B: HLA-DRB1*14:01L HLA-DRB1*12:01L HLA-DRB1*04:08L
YSYATHSDKFTDG

SEQ ID NO: 21689 - protein, 12 aa, Severe acute respiratory syndrome coronavirus 2
  REGION 1..12: note = Table B: HLA-DRB1*14:01L HLA-DRB1*08:01L
GSLYVNKHAFHT

SEQ ID NO: 21690 - protein, 12 aa, Severe acute respiratory syndrome coronavirus 2
  REGION 1..12: note = Table B: HLA-DRB1*14:01L HLA-DRB1*08:01L
SLYVNKHAFHTP

SEQ ID NO: 21691 - protein, 12 aa, Severe acute respiratory syndrome coronavirus 2
  REGION 1..12: note = Table B: HLA-DRB1*14:01L
VNLKQLPFFYYS

SEQ ID NO: 21692 - protein, 12 aa, Severe acute respiratory syndrome coronavirus 2
  REGION 1..12: note = Table B: HLA-DRB1*14:01L HLA-DRB1*12:01L HLA-DRB1*04:08L HLA-DRB1*15:01L
VYKQFDTYNLWN

SEQ ID NO: 21693 - protein, 12 aa, Severe acute respiratory syndrome coronavirus 2
  REGION 1..12: note = Table B: HLA-DRB1*14:01L HLA-DRB1*08:01L
QSLENVAFNVVN

SEQ ID NO: 21694 - protein, 12 aa, Severe acute respiratory syndrome coronavirus 2
  REGION 1..12: note = Table B: HLA-DRB1*14:01L HLA-DRB1*11:01L
SLENVAFNVVNK

SEQ ID NO: 21695 - protein, 16 aa, Severe acute respiratory syndrome coronavirus 2
  REGION 1..16: note = Table B: HLA-DRB1*14:01L
LPVNVAFELWAKRNIK

SEQ ID NO: 21696 - protein, 11 aa, Severe acute respiratory syndrome coronavirus 2
  REGION 1..11: note = Table B: HLA-DRB1*14:01L
FELWAKRNIKP

SEQ ID NO: 21697 - protein, 12 aa, Severe acute respiratory syndrome coronavirus 2
  REGION 1..12: note = Table B: HLA-DRB1*14:01L HLA-DPA1*01:02-B1*04:01L HLA-DRB1*16:01L
NTVIWDYKRDAP

SEQ ID NO: 21698 - protein, 12 aa, Severe acute respiratory syndrome coronavirus 2
  REGION 1..12: note = Table B: HLA-DRB1*14:01L
IWDYKRDAPAHI

SEQ ID NO: 21699 - protein, 11 aa, Severe acute respiratory syndrome coronavirus 2
  REGION 1..11: note = Table B: HLA-DRB1*14:01L HLA-DPA1*01:02-B1*04:01L HLA-DRB1*16:01L
DLFRNARNGVL

SEQ ID NO: 21700 - protein, 14 aa, Severe acute respiratory syndrome coronavirus 2
  REGION 1..14: note = Table B: HLA-DRB1*14:01L HLA-DRB1*12:01L HLA-DPA1*02:01-B1*13:01L HLA-DQA1*01:03-B1*06:01L HLA-DRB1*15:03L
SRNLQEFKPRSQME

SEQ ID NO: 21701 - protein, 12 aa, Severe acute respiratory syndrome coronavirus 2
  REGION 1..12: note = Table B: HLA-DRB1*14:01L
DEFIERYKLEGY

SEQ ID NO: 21702 - protein, 12 aa, Severe acute respiratory syndrome coronavirus 2
  REGION 1..12: note = Table B: HLA-DRB1*14:01L
HLLIGLAKRFKE

SEQ ID NO: 21703 - protein, 13 aa, Severe acute respiratory syndrome coronavirus 2
  REGION 1..13: note = Table B: HLA-DRB1*14:01L
LIGLAKRFKESPF

SEQ ID NO: 21704 - protein, 11 aa, Severe acute respiratory syndrome coronavirus 2
  REGION 1..11: note = Table B: HLA-DRB1*14:01L
EIIKSQDLSVV

SEQ ID NO: 21705 - protein, 11 aa, Severe acute respiratory syndrome coronavirus 2
  REGION 1..11: note = Table B: HLA-DRB1*14:01L
VVSKVVKVTID

SEQ ID NO: 21706 - protein, 16 aa, Severe acute respiratory syndrome coronavirus 2
  REGION 1..16: note = Table B: HLA-DRB1*14:01L
SSQAWQPGVAMPNLYK

SEQ ID NO: 21707 - protein, 12 aa, Severe acute respiratory syndrome coronavirus 2
  REGION 1..12: note = Table B: HLA-DRB1*14:01L
MPNLYKMQRMLL

SEQ ID NO: 21708 - protein, 12 aa, Severe acute respiratory syndrome coronavirus 2
  REGION 1..12: note = Table B: HLA-DRB1*14:01L
PNLYKMQRMLLE

SEQ ID NO: 21709 - protein, 12 aa, Severe acute respiratory syndrome coronavirus 2
  REGION 1..12: note = Table B: HLA-DRB1*14:01L HLA-DRB1*12:01L
GSVAIKITEHSW

SEQ ID NO: 21710 - protein, 12 aa, Severe acute respiratory syndrome coronavirus 2
  REGION 1..12: note = Table B: HLA-DRB1*14:01L HLA-DPA1*02:01-B1*13:01L HLA-DQA1*05:05-B1*03:01L HLA-DPA1*01:02-B1*04:01L
EQIDGYVMHANY

SEQ ID NO: 21711 - protein, 12 aa, Severe acute respiratory syndrome coronavirus 2
  REGION 1..12: note = Table B: HLA-DRB1*14:01L HLA-DRB1*16:01L
TNPIQLSSYSLF

SEQ ID NO: 21712 - protein, 10 aa, Severe acute respiratory syndrome coronavirus 2
  REGION 1..10: note = Table B: HLA-DRB1*14:01L HLA-DRB1*15:03L
ILSLLSKGRL

SEQ ID NO: 21713 - protein, 13 aa, Severe acute respiratory syndrome coronavirus 2
  REGION 1..13: note = Table B: HLA-DRB1*14:01L
SKGRLIIRENNRV

SEQ ID NO: 21714 - protein, 10 aa, Severe acute respiratory syndrome coronavirus 2
  REGION 1..10: note = Table B: HLA-DRB1*14:01L HLA-DRB1*16:01L
IIRENNRVVI

SEQ ID NO: 21715 - protein, 17 aa, Severe acute respiratory syndrome coronavirus 2
  REGION 1..17: note = Table B: HLA-DRB1*14:01L
AIHVSGTNGTKRFDNPV

SEQ ID NO: 21716 - protein, 15 aa, Severe acute respiratory syndrome coronavirus 2
  REGION 1..15: note = Table B: HLA-DRB1*14:01L HLA-DRB1*14:02L HLA-DRB1*11:01L HLA-DRB1*08:03L
IIRGWIFGTTLDSKT

SEQ ID NO: 21717 - protein, 12 aa, Severe acute respiratory syndrome coronavirus 2
  REGION 1..12: note = Table B: HLA-DRB1*14:01L
TNVVIKVCEFQF

SEQ ID NO: 21718 - protein, 12 aa, Severe acute respiratory syndrome coronavirus 2
  REGION 1..12: note = Table B: HLA-DRB1*14:01L HLA-DRB1*08:01L HLA-DRB1*04:08L
LGVYYHKNNKSW

SEQ ID NO: 21719 - protein, 11 aa, Severe acute respiratory syndrome coronavirus 2
  REGION 1..11: note = Table B: HLA-DRB1*14:01L
VYYHKNNKSWM

SEQ ID NO: 21720 - protein, 12 aa, Severe acute respiratory syndrome coronavirus 2
  REGION 1..12: note = Table B: HLA-DRB1*14:01L
QGNFKNLREFVF

SEQ ID NO: 21721 - protein, 13 aa, Severe acute respiratory syndrome coronavirus 2
  REGION 1..13: note = Table B: HLA-DRB1*14:01L HLA-DRB1*08:01L HLA-DRB1*04:08L
FKNIDGYFKIYSK

SEQ ID NO: 21722 - protein, 10 aa, Severe acute respiratory syndrome coronavirus 2
  REGION 1..10: note = Table B: HLA-DRB1*14:01L
TLLALHRSYL

SEQ ID NO: 21723 - protein, 12 aa, Severe acute respiratory syndrome coronavirus 2
  REGION 1..12: note = Table B: HLA-DRB1*14:01L HLA-DQA1*01-B1*05L HLA-DRB1*15:03L
TFLLKYNENGTI

SEQ ID NO: 21724 - protein, 13 aa, Severe acute respiratory syndrome coronavirus 2
  REGION 1..13: note = Table B: HLA-DRB1*14:01L HLA-DRB1*11:01L
TRFASVYAWNRKR

SEQ ID NO: 21725 - protein, 11 aa, Severe acute respiratory syndrome coronavirus 2
  REGION 1..11: note = Table B: HLA-DRB1*14:01L
SVYAWNRKRIS

SEQ ID NO: 21726 - protein, 13 aa, Severe acute respiratory syndrome coronavirus 2
  REGION 1..13: note = Table B: HLA-DRB1*14:01L
FVIRGDEVRQIAP

SEQ ID NO: 21727 - protein, 17 aa, Severe acute respiratory syndrome coronavirus 2
  REGION 1..17: note = Table B: HLA-DRB1*14:01L
APGQTGKIADYNYKLPD

SEQ ID NO: 21728 - protein, 12 aa, Severe acute respiratory syndrome coronavirus 2
  REGION 1..12: note = Table B: HLA-DRB1*14:01L HLA-DRB1*16:01L HLA-DRB1*04:08L
GGNYNYLYRLFR

SEQ ID NO: 21729 - protein, 11 aa, Severe acute respiratory syndrome coronavirus 2
  REGION 1..11: note = Table B: HLA-DRB1*14:01L HLA-DQA1*01-B1*05L HLA-DPA1*02:01-B1*13:01L HLA-DQA1*03:01-B1*03:02L HLA-DRB1*16:01L HLA-DQA1*02:01-B1*03:03L
KPFERDISTEI

SEQ ID NO: 21730 - protein, 12 aa, Severe acute respiratory syndrome coronavirus 2
  REGION 1..12: note = Table B: HLA-DRB1*14:01L
VLTESNKKFLPF

SEQ ID NO: 21731 - protein, 14 aa, Severe acute respiratory syndrome coronavirus 2
  REGION 1..14: note = Table B: HLA-DRB1*14:01L HLA-DQA1*05:01-B1*02:01L
TESNKKFLPFQQFG

SEQ ID NO: 21732 - protein, 11 aa, Severe acute respiratory syndrome coronavirus 2
  REGION 1..11: note = Table B: HLA-DRB1*14:01L
DQLTPTWRVYS

SEQ ID NO: 21733 - protein, 11 aa, Severe acute respiratory syndrome coronavirus 2
  REGION 1..11: note = Table B: HLA-DRB1*14:01L HLA-DRB1*14:17L
AQVKQIYKTPP

SEQ ID NO: 21734 - protein, 12 aa, Severe acute respiratory syndrome coronavirus 2
  REGION 1..12: note = Table B: HLA-DRB1*14:01L HLA-DRB1*04:08L
IYKTPPIKDFGG

SEQ ID NO: 21735 - protein, 12 aa, Severe acute respiratory syndrome coronavirus 2
  REGION 1..12: note = Table B: HLA-DRB1*14:01L HLA-DRB1*12:01L HLA-DRB1*16:01L HLA-DRB1*15:03L
TPPIKDFGGFNF

SEQ ID NO: 21736 - protein, 11 aa, Severe acute respiratory syndrome coronavirus 2
  REGION 1..11: note = Table B: HLA-DRB1*14:01L HLA-DRB4*01:01L HLA-DRB1*10:01L
SFIEDLLFNKV

SEQ ID NO: 21737 - protein, 12 aa, Severe acute respiratory syndrome coronavirus 2
  REGION 1..12: note = Table B: HLA-DRB1*14:01L
IEDLLFNKVTLA

SEQ ID NO: 21738 - protein, 12 aa, Severe acute respiratory syndrome coronavirus 2
  REGION 1..12: note = Table B: HLA-DRB1*14:01L HLA-DRB1*15:03L
EDLLFNKVTLAD

SEQ ID NO: 21739 - protein, 12 aa, Severe acute respiratory syndrome coronavirus 2
  REGION 1..12: note = Table B: HLA-DRB1*14:01L HLA-DRB1*08:01L
ARDLICAQKFNG

SEQ ID NO: 21740 - protein, 14 aa, Severe acute respiratory syndrome coronavirus 2
  REGION 1..14: note = Table B: HLA-DRB1*14:01L
EMIAQYTSALLAGT

SEQ ID NO: 21741 - protein, 12 aa, Severe acute respiratory syndrome coronavirus 2
  REGION 1..12: note = Table B: HLA-DRB1*14:01L
QIPFAMQMAYRF

SEQ ID NO: 21742 - protein, 15 aa, Severe acute respiratory syndrome coronavirus 2
  REGION 1..15: note = Table B: HLA-DRB1*14:01L HLA-DRB1*14:02L
SSTASALGKLQDVVN

SEQ ID NO: 21743 - protein, 11 aa, Severe acute respiratory syndrome coronavirus 2
  REGION 1..11: note = Table B: HLA-DRB1*14:01L
ALNTLVKQLSS

SEQ ID NO: 21744 - protein, 11 aa, Severe acute respiratory syndrome coronavirus 2
  REGION 1..11: note = Table B: HLA-DRB1*14:01L
LNTLVKQLSSN

SEQ ID NO: 21745 - protein, 13 aa, Severe acute respiratory syndrome coronavirus 2
  REGION 1..13: note = Table B: HLA-DRB1*14:01L HLA-DRB1*08:01L
LNDILSRLDKVEA

SEQ ID NO: 21746 - protein, 12 aa, Severe acute respiratory syndrome coronavirus 2
  REGION 1..12: note = Table B: HLA-DRB1*14:01L HLA-DPA1*02:01-B1*13:01L HLA-DRB1*04:08L
LQTYVTQQLIRA

SEQ ID NO: 21747 - protein, 13 aa, Severe acute respiratory syndrome coronavirus 2
  REGION 1..13: note = Table B: HLA-DRB1*14:01L HLA-DRB1*12:01L HLA-DRB1*14:17L HLA-DRB1*16:01L
VTQQLIRAAEIRA

SEQ ID NO: 21748 - protein, 14 aa, Severe acute respiratory syndrome coronavirus 2
  REGION 1..14: note = Table B: HLA-DRB1*14:01L HLA-DRB1*12:01L HLA-DRB1*15:03L
APHGVVFLHVTYVP

SEQ ID NO: 21749 - protein, 12 aa, Severe acute respiratory syndrome coronavirus 2
  REGION 1..12: note = Table B: HLA-DRB1*14:01L HLA-DPA1*02:01-B1*13:01L
LHVTYVPAQEKN

SEQ ID NO: 21750 - protein, 11 aa, Severe acute respiratory syndrome coronavirus 2
  REGION 1..11: note = Table B: HLA-DRB1*14:01L
VTYVPAQEKNF

SEQ ID NO: 21751 - protein, 12 aa, Severe acute respiratory syndrome coronavirus 2
  REGION 1..12: note = Table B: HLA-DRB1*14:01L
VFVSNGTHWFVT

SEQ ID NO: 21752 - protein, 16 aa, Severe acute respiratory syndrome coronavirus 2
  REGION 1..16: note = Table B: HLA-DRB1*14:01L HLA-DRB1*11:02L HLA-DRB1*14:02L HLA-DRB4*01:01L HLA-DRB1*09:01L HLA-DRB3*01:01L HLA-DRB1*07:01L
VTQRNFYEPQIITTDN

SEQ ID NO: 21753 - protein, 13 aa, Severe acute respiratory syndrome coronavirus 2
  REGION 1..13: note = Table B: HLA-DRB1*14:01L HLA-DRB1*15:03L
TIGTVTLKQGEIK

SEQ ID NO: 21754 - protein, 17 aa, Severe acute respiratory syndrome coronavirus 2
  REGION 1..17: note = Table B: HLA-DRB1*14:01L
IGTVTLKQGEIKDATPS

SEQ ID NO: 21755 - protein, 10 aa, Severe acute respiratory syndrome coronavirus 2
  REGION 1..10: note = Table B: HLA-DRB1*14:01L HLA-DRB1*08:01L
KIITLKKRWQ

SEQ ID NO: 21756 - protein, 15 aa, Severe acute respiratory syndrome coronavirus 2
  REGION 1..15: note = Table B: HLA-DRB1*14:01L
GVVNPVMEPIYDEPT

SEQ ID NO: 21757 - protein, 11 aa, Severe acute respiratory syndrome coronavirus 2
  REGION 1..11: note = Table B: HLA-DRB1*14:01L HLA-DRB1*08:01L
FYVYSRVKNLN

SEQ ID NO: 21758 - protein, 12 aa, Severe acute respiratory syndrome coronavirus 2
  REGION 1..12: note = Table B: HLA-DRB1*14:01L
TITVEELKKLLE

SEQ ID NO: 21759 - protein, 12 aa, Severe acute respiratory syndrome coronavirus 2
  REGION 1..12: note = Table B: HLA-DRB1*14:01L HLA-DPA1*03:01-B1*105:01L
VEELKKLLEQWN

SEQ ID NO: 21760 - protein, 12 aa, Severe acute respiratory syndrome coronavirus 2
  REGION 1..12: note = Table B: HLA-DRB1*14:01L
RNRFLYIIKLIF

SEQ ID NO: 21761 - protein, 12 aa, Severe acute respiratory syndrome coronavirus 2
  REGION 1..12: note = Table B: HLA-DRB1*14:01L
LSYFIASFRLFA

SEQ ID NO: 21762 - protein, 11 aa, Severe acute respiratory syndrome coronavirus 2
  REGION 1..11: note = Table B: HLA-DRB1*14:01L HLA-DRB1*14:54L
TNILLNVPLHG

SEQ ID NO: 21763 - protein, 13 aa, Severe acute respiratory syndrome coronavirus 2
  REGION 1..13: note = Table B: HLA-DRB1*14:01L
IGAVILRGHLRIA

SEQ ID NO: 21764 - protein, 12 aa, Severe acute respiratory syndrome coronavirus 2
  REGION 1..12: note = Table B: HLA-DRB1*14:01L
DIKDLPKEITVA

SEQ ID NO: 21765 - protein, 15 aa, Severe acute respiratory syndrome coronavirus 2
  REGION 1..15: note = Table B: HLA-DRB1*14:01L HLA-DRB1*11:01L
TSRTLSYYKLGASQR

SEQ ID NO: 21766 - protein, 12 aa, Severe acute respiratory syndrome coronavirus 2
  REGION 1..12: note = Table B: HLA-DRB1*14:01L
DSGFAAYSRYRI

SEQ ID NO: 21767 - protein, 11 aa, Severe acute respiratory syndrome coronavirus 2
  REGION 1..11: note = Table B: HLA-DRB1*14:01L
GFAAYSRYRIG

SEQ ID NO: 21768 - protein, 10 aa, Severe acute respiratory syndrome coronavirus 2
  REGION 1..10: note = Table B: HLA-DRB1*14:01L HLA-DQA1*02:01-B1*03:03L HLA-DRB1*15:03L
LIIKNLSKSL

SEQ ID NO: 21769 - protein, 10 aa, Severe acute respiratory syndrome coronavirus 2
  REGION 1..10: note = Table B: HLA-DRB1*14:01L
IIKNLSKSLT

SEQ ID NO: 21770 - protein, 14 aa, Severe acute respiratory syndrome coronavirus 2
  REGION 1..14: note = Table B: HLA-DRB1*14:01L HLA-DRB1*08:01L
VKHVYQLRARSVSP

SEQ ID NO: 21771 - protein, 12 aa, Severe acute respiratory syndrome coronavirus 2
  REGION 1..12: note = Table B: HLA-DRB1*14:01L HLA-DRB1*15:03L
LPFTINCQEPKL

SEQ ID NO: 21772 - protein, 13 aa, Severe acute respiratory syndrome coronavirus 2
  REGION 1..13: note = Table B: HLA-DRB1*14:01L
GVPINTNSSPDDQ

SEQ ID NO: 21773 - protein, 13 aa, Severe acute respiratory syndrome coronavirus 2
  REGION 1..13: note = Table B: HLA-DRB1*14:01L HLA-DRB1*11:04L HLA-DRB1*11:01L HLA-DRB1*12:01L
IGYYRRATRRIRG

SEQ ID NO: 21774 - protein, 15 aa, Severe acute respiratory syndrome coronavirus 2
  REGION 1..15: note = Table B: HLA-DRB1*14:01L HLA-DRB1*11:04L
GYYRRATRRIRGGDG

SEQ ID NO: 21775 - protein, 11 aa, Severe acute respiratory syndrome coronavirus 2
  REGION 1..11: note = Table B: HLA-DRB1*14:01L
SAFFGMSRIGM

SEQ ID NO: 21776 - protein, 15 aa, Severe acute respiratory syndrome coronavirus 2
  REGION 1..15: note = Table B: HLA-DRB1*14:01L HLA-DRB1*11:04L HLA-DRB3*01:01L
DKDPNFKDQVILLNK

SEQ ID NO: 21777 - protein, 12 aa, Severe acute respiratory syndrome coronavirus 2
  REGION 1..12: note = Table B: HLA-DRB1*14:01L
ILLNKHIDAYKT

SEQ ID NO: 21778 - protein, 18 aa, Severe acute respiratory syndrome coronavirus 2
  REGION 1..18: note = Table B: HLA-DRB1*11:02L HLA-DQA1*05:05-B1*03:19L HLA-DPA1*01:03-B1*104:01L
LPQLEQPYVFIKRSDART

SEQ ID NO: 21779 - protein, 16 aa, Severe acute respiratory syndrome coronavirus 2
  REGION 1..16: note = Table B: HLA-DRB1*11:02L HLA-DQA1*05:05-B1*03:19L HLA-DPA1*02:01-B1*13:01L HLA-DQA1*05:05-B1*03:01L
EQPYVFIKRSDARTAP

SEQ ID NO: 21780 - protein, 17 aa, Severe acute respiratory syndrome coronavirus 2
  REGION 1..17: note = Table B: HLA-DRB1*11:02L
GGAYTRYVDNNFCGPDG

SEQ ID NO: 21781 - protein, 14 aa, Severe acute respiratory syndrome coronavirus 2
  REGION 1..14: note = Table B: HLA-DRB1*11:02L HLA-DRB4*01:01L HLA-DPA1*01:03-B1*02:01L HLA-DRB1*08:02L
SEKSYELQTPFEIK

SEQ ID NO: 21782 - protein, 16 aa, Severe acute respiratory syndrome coronavirus 2
  REGION 1..16: note = Table B: HLA-DRB1*11:02L HLA-DRB1*08:02L
VFPLNSIIKTIQPRVE

SEQ ID NO: 21783 - protein, 11 aa, Severe acute respiratory syndrome coronavirus 2
  REGION 1..11: note = Table B: HLA-DRB1*11:02L
GYLPQNAVVKI

SEQ ID NO: 21784 - protein, 14 aa, Severe acute respiratory syndrome coronavirus 2
  REGION 1..14: note = Table B: HLA-DRB1*11:02L HLA-DRB1*14:02L HLA-DQA1*05:05-B1*03:19L HLA-DRB1*08:02L
NLLEILQKEKVNIN

SEQ ID NO: 21785 - protein, 14 aa, Severe acute respiratory syndrome coronavirus 2
  REGION 1..14: note = Table B: HLA-DRB1*11:02L HLA-DPA1*01:03-B1*104:01L
IVGDFKLNEEIAII

SEQ ID NO: 21786 - protein, 15 aa, Severe acute respiratory syndrome coronavirus 2
  REGION 1..15: note = Table B: HLA-DRB1*11:02L HLA-DRB1*14:02L HLA-DRB1*08:02L
VKGLDYKAFKQIVES

SEQ ID NO: 21787 - protein, 11 aa, Severe acute respiratory syndrome coronavirus 2
  REGION 1..11: note = Table B: HLA-DRB1*11:02L
GEQKSILSPLY

SEQ ID NO: 21788 - protein, 15 aa, Severe acute respiratory syndrome coronavirus 2
  REGION 1..15: note = Table B: HLA-DRB1*11:02L HLA-DRB1*08:02L
LTNIFGTVYEKLKPV

SEQ ID NO: 21789 - protein, 15 aa, Severe acute respiratory syndrome coronavirus 2
  REGION 1..15: note = Table B: HLA-DRB1*11:02L HLA-DRB1*11:04L HLA-DRB3*01:01L
GTVYEKLKPVLDWLE

SEQ ID NO: 21790 - protein, 16 aa, Severe acute respiratory syndrome coronavirus 2
  REGION 1..16: note = Table B: HLA-DRB1*11:02L
IKESVQTFFKLVNKFL

SEQ ID NO: 21791 - protein, 15 aa, Severe acute respiratory syndrome coronavirus 2
  REGION 1..15: note = Table B: HLA-DRB1*11:02L HLA-DPA1*01:03-B1*104:01L HLA-DRB1*08:02L
SIIIGGAKLKALNLG

SEQ ID NO: 21792 - protein, 16 aa, Severe acute respiratory syndrome coronavirus 2
  REGION 1..16: note = Table B: HLA-DRB1*11:02L
TNNTFTLKGGAPTKVT

SEQ ID NO: 21793 - protein, 11 aa, Severe acute respiratory syndrome coronavirus 2
  REGION 1..11: note = Table B: HLA-DRB1*11:02L HLA-DQA1*01-B1*05L
GDDTVIEVQGY

SEQ ID NO: 21794 - protein, 16 aa, Severe acute respiratory syndrome coronavirus 2
  REGION 1..16: note = Table B: HLA-DRB1*11:02L HLA-DRB1*11:03L HLA-DRB3*01:01L
TEDDYQGKPLEFGATS

SEQ ID NO: 21795 - protein, 17 aa, Severe acute respiratory syndrome coronavirus 2
  REGION 1..17: note = Table B: HLA-DRB1*11:02L HLA-DPA1*01:03-B1*04:01L
KPLEFGATSAALQPEEE

SEQ ID NO: 21796 - protein, 14 aa, Severe acute respiratory syndrome coronavirus 2
  REGION 1..14: note = Table B: HLA-DRB1*11:02L HLA-DRB4*02:01NL HLA-DPA1*01:03-B1*02:01L HLA-DPA1*01:03-B1*104:01L
VAGALNKATNNAMQ

SEQ ID NO: 21797 - protein, 14 aa, Severe acute respiratory syndrome coronavirus 2
  REGION 1..14: note = Table B: HLA-DRB1*11:02L HLA-DRB1*11:03L HLA-DPA1*01:03-B1*02:01L
LAVFDKNLYDKLVS

SEQ ID NO: 21798 - protein, 14 aa, Severe acute respiratory syndrome coronavirus 2
  REGION 1..14: note = Table B: HLA-DRB1*11:02L HLA-DRB1*13:01L HLA-DRB1*08:03L
QKIAEIPKEEVKPF

SEQ ID NO: 21799 - protein, 18 aa, Severe acute respiratory syndrome coronavirus 2
  REGION 1..18: note = Table B: HLA-DRB1*11:02L HLA-DRB4*01:01L HLA-DPA1*01:03-B1*04:01L
IPKEEVKPFITESKPSVE

SEQ ID NO: 21800 - protein, 19 aa, Severe acute respiratory syndrome coronavirus 2
  REGION 1..19: note = Table B: HLA-DRB1*11:02L
HPDSATLVSDIDITFLKKD

SEQ ID NO: 21801 - protein, 20 aa, Severe acute respiratory syndrome coronavirus 2
  REGION 1..20: note = Table B: HLA-DRB1*11:02L
PDSATLVSDIDITFLKKDAP

SEQ ID NO: 21802 - protein, 18 aa, Severe acute respiratory syndrome coronavirus 2
  REGION 1..18: note = Table B: HLA-DRB1*11:02L
YPGQGLNGYTVEEAKTVL

SEQ ID NO: 21803 - protein, 14 aa, Severe acute respiratory syndrome coronavirus 2
  REGION 1..14: note = Table B: HLA-DRB1*11:02L HLA-DRB4*01:01L HLA-DPA1*01:03-B1*04:01L HLA-DPA1*01:03-B1*04:02L HLA-DPA1*02:01-B1*13:01L
ILPSIISNEKQEIL

SEQ ID NO: 21804 - protein, 15 aa, Severe acute respiratory syndrome coronavirus 2
  REGION 1..15: note = Table B: HLA-DRB1*11:02L HLA-DQA1*05:05-B1*03:116L HLA-DRB1*08:02L
EKQEILGTVSWNLRE

SEQ ID NO: 21805 - protein, 14 aa, Severe acute respiratory syndrome coronavirus 2
  REGION 1..14: note = Table B: HLA-DRB1*11:02L HLA-DRB1*08:02L
YFYTSKTTVASLIN

SEQ ID NO: 21806 - protein, 14 aa, Severe acute respiratory syndrome coronavirus 2
  REGION 1..14: note = Table B: HLA-DRB1*11:02L
SVYYTSNPTTFHLD

SEQ ID NO: 21807 - protein, 15 aa, Severe acute respiratory syndrome coronavirus 2
  REGION 1..15: note = Table B: HLA-DRB1*11:02L HLA-DRB1*14:02L HLA-DRB4*01:01L HLA-DPA1*01:03-B1*04:01L HLA-DRB1*09:01L HLA-DRB1*08:02L
LREVRTIKVFTTVDN

SEQ ID NO: 21808 - protein, 15 aa, Severe acute respiratory syndrome coronavirus 2
  REGION 1..15: note = Table B: HLA-DRB1*11:02L HLA-DRB4*01:01L HLA-DRB1*08:02L HLA-DRB1*15:01L
IKVFTTVDNINLHTQ

SEQ ID NO: 21809 - protein, 18 aa, Severe acute respiratory syndrome coronavirus 2
  REGION 1..18: note = Table B: HLA-DRB1*11:02L HLA-DPA1*01:03-B1*04:02L HLA-DRB1*08:02L
DGADVTKIKPHNSHEGKT

SEQ ID NO: 21810 - protein, 11 aa, Severe acute respiratory syndrome coronavirus 2
  REGION 1..11: note = Table B: HLA-DRB1*11:02L HLA-DRB1*12:01L
DDTLRVEAFEY

SEQ ID NO: 21811 - protein, 17 aa, Severe acute respiratory syndrome coronavirus 2
  REGION 1..17: note = Table B: HLA-DRB1*11:02L HLA-DRB1*11:03L
DTLRVEAFEYYHTTDPS

SEQ ID NO: 21812 - protein, 14 aa, Severe acute respiratory syndrome coronavirus 2
  REGION 1..14: note = Table B: HLA-DRB1*11:02L HLA-DRB1*11:03L HLA-DQA1*05:05-B1*03:116L HLA-DQA1*05:05-B1*03:01L
TLSYEQFKKGVQIP

SEQ ID NO: 21813 - protein, 18 aa, Severe acute respiratory syndrome coronavirus 2
  REGION 1..18: note = Table B: HLA-DRB1*11:02L
APPAQYELKHGTFTCASE

SEQ ID NO: 21814 - protein, 18 aa, Severe acute respiratory syndrome coronavirus 2
  REGION 1..18: note = Table B: HLA-DRB1*11:02L HLA-DPA1*01:03-B1*104:01L
YTGNYQCGHYKHITSKET

SEQ ID NO: 21815 - protein, 11 aa, Severe acute respiratory syndrome coronavirus 2
  REGION 1..11: note = Table B: HLA-DRB1*11:02L HLA-DRB1*10:01L HLA-DRB1*08:02L
EYKGPITDVFY

SEQ ID NO: 21816 - protein, 15 aa, Severe acute respiratory syndrome coronavirus 2
  REGION 1..15: note = Table B: HLA-DRB1*11:02L HLA-DRB5*01:01L HLA-DRB4*02:01NL HLA-DRB1*13:01L HLA-DRB1*15:01L
DNSYFTEQPIDLVPN

SEQ ID NO: 21817 - protein, 13 aa, Severe acute respiratory syndrome coronavirus 2
  REGION 1..13: note = Table B: HLA-DRB1*11:02L HLA-DRB4*02:01NL HLA-DPA1*01:03-B1*04:01L HLA-DPA1*01:03-B1*02:01L HLA-DRB1*08:02L
QPIDLVPNQPYPN

SEQ ID NO: 21818 - protein, 14 aa, Severe acute respiratory syndrome coronavirus 2
  REGION 1..14: note = Table B: HLA-DRB1*11:02L HLA-DRB1*08:02L
PIDLVPNQPYPNAS

SEQ ID NO: 21819 - protein, 13 aa, Severe acute respiratory syndrome coronavirus 2
  REGION 1..13: note = Table B: HLA-DRB1*11:02L HLA-DPA1*01:03-B1*104:01L
DLVPNQPYPNASF

SEQ ID NO: 21820 - protein, 19 aa, Severe acute respiratory syndrome coronavirus 2
  REGION 1..19: note = Table B: HLA-DRB1*11:02L HLA-DQA1*05:05-B1*03:19L
KPASRELKVTFFPDLNGDV

SEQ ID NO: 21821 - protein, 15 aa, Severe acute respiratory syndrome coronavirus 2
  REGION 1..15: note = Table B: HLA-DRB1*11:02L HLA-DRB1*15:01L
ELKVTFFPDLNGDVV

SEQ ID NO: 21822 - protein, 16 aa, Severe acute respiratory syndrome coronavirus 2
  REGION 1..16: note = Table B: HLA-DRB1*11:02L HLA-DPA1*01:03-B1*04:02L
IDYKHYTPSFKKGAKL

SEQ ID NO: 21823 - protein, 16 aa, Severe acute respiratory syndrome coronavirus 2
  REGION 1..16: note = Table B: HLA-DRB1*11:02L HLA-DRB1*14:02L HLA-DPA1*01:03-B1*04:02L HLA-DPA1*02:01-B1*13:01L HLA-DPA1*03:01-B1*105:01L HLA-DQA1*01:03-B1*06:01L HLA-DRB1*08:02L
TPSFKKGAKLLHKPIV

SEQ ID NO: 21824 - protein, 14 aa, Severe acute respiratory syndrome coronavirus 2
  REGION 1..14: note = Table B: HLA-DRB1*11:02L
LNKVVSTTTNIVTR

SEQ ID NO: 21825 - protein, 16 aa, Severe acute respiratory syndrome coronavirus 2
  REGION 1..16: note = Table B: HLA-DRB1*11:02L HLA-DPA1*01:03-B1*104:01L
MPTTIAKNTVKSVGKF

SEQ ID NO: 21826 - protein, 16 aa, Severe acute respiratory syndrome coronavirus 2
  REGION 1..16: note = Table B: HLA-DRB1*11:02L HLA-DRB1*08:02L
ASFNYLKSPNFSKLIN

SEQ ID NO: 21827 - protein, 13 aa, Severe acute respiratory syndrome coronavirus 2
  REGION 1..13: note = Table B: HLA-DRB1*11:02L
GSTFISDEVARDL

SEQ ID NO: 21828 - protein, 14 aa, Severe acute respiratory syndrome coronavirus 2
  REGION 1..14: note = Table B: HLA-DRB1*11:02L HLA-DPA1*01:03-B1*02:01L
TFISDEVARDLSLQ

SEQ ID NO: 21829 - protein, 16 aa, Severe acute respiratory syndrome coronavirus 2
  REGION 1..16: note = Table B: HLA-DRB1*11:02L HLA-DRB1*14:02L HLA-DPA1*01:03-B1*04:02L
RDLSLQFKRPINPTDQ

SEQ ID NO: 21830 - protein, 16 aa, Severe acute respiratory syndrome coronavirus 2
  REGION 1..16: note = Table B: HLA-DRB1*11:02L HLA-DPA1*01:03-B1*04:01L HLA-DQA1*05:05-B1*03:116L HLA-DPA1*01:03-B1*02:01L HLA-DRB1*08:02L
SSYIVDSVTVKNGSIH

SEQ ID NO: 21831 - protein, 15 aa, Severe acute respiratory syndrome coronavirus 2
  REGION 1..15: note = Table B: HLA-DRB1*11:02L HLA-DRB1*13:01L HLA-DRB1*10:01L
NGSIHLYFDKAGQKT

SEQ ID NO: 21832 - protein, 18 aa, Severe acute respiratory syndrome coronavirus 2
  REGION 1..18: note = Table B: HLA-DRB1*11:02L
LDQALVSDVGDSAEVAVK

SEQ ID NO: 21833 - protein, 11 aa, Severe acute respiratory syndrome coronavirus 2
  REGION 1..11: note = Table B: HLA-DRB1*11:02L HLA-DRB1*08:02L
AEVAVKMFDAY

SEQ ID NO: 21834 - protein, 12 aa, Severe acute respiratory syndrome coronavirus 2
  REGION 1..12: note = Table B: HLA-DRB1*11:02L HLA-DRB1*09:01L HLA-DRB3*01:01L HLA-DPA1*01:03-B1*02:01L HLA-DPA1*01:03-B1*104:01L HLA-DRB1*08:02L HLA-DRB1*08:03L
TFISAARQGFVD

SEQ ID NO: 21835 - protein, 15 aa, Severe acute respiratory syndrome coronavirus 2
  REGION 1..15: note = Table B: HLA-DRB1*11:02L HLA-DRB1*11:03L HLA-DQA1*05:05-B1*03:19L HLA-DPA1*01:03-B1*02:01L HLA-DRB1*08:02L
TKDVVECLKLSHQSD

SEQ ID NO: 21836 - protein, 15 aa, Severe acute respiratory syndrome coronavirus 2
  REGION 1..15: note = Table B: HLA-DRB1*11:02L HLA-DRB1*11:03L HLA-DRB1*10:01L HLA-DRB1*08:03L
ALIWNVKDFMSLSEQ

SEQ ID NO: 21837 - protein, 17 aa, Severe acute respiratory syndrome coronavirus 2
  REGION 1..17: note = Table B: HLA-DRB1*11:02L
LSEQLRKQIRSAAKKNN

SEQ ID NO: 21838 - protein, 15 aa, Severe acute respiratory syndrome coronavirus 2
  REGION 1..15: note = Table B: HLA-DRB1*11:02L HLA-DRB1*08:03L
RKQIRSAAKKNNLPF

SEQ ID NO: 21839 - protein, 16 aa, Severe acute respiratory syndrome coronavirus 2
  REGION 1..16: note = Table B: HLA-DRB1*11:02L
VGNICYTPSKLIEYTD

SEQ ID NO: 21840 - protein, 16 aa, Severe acute respiratory syndrome coronavirus 2
  REGION 1..16: note = Table B: HLA-DRB1*11:02L
RWVLNNDYYRSLPGVF

SEQ ID NO: 21841 - protein, 16 aa, Severe acute respiratory syndrome coronavirus 2
  REGION 1..16: note = Table B: HLA-DRB1*11:02L HLA-DRB1*11:04L HLA-DRB1*09:01L
NNDYYRSLPGVFCGVD

SEQ ID NO: 21842 - protein, 15 aa, Severe acute respiratory syndrome coronavirus 2
  REGION 1..15: note = Table B: HLA-DRB1*11:02L HLA-DRB4*01:01L
TNMFTPLIQPIGALD

SEQ ID NO: 21843 - protein, 16 aa, Severe acute respiratory syndrome coronavirus 2
  REGION 1..16: note = Table B: HLA-DRB1*11:02L HLA-DRB1*14:02L
LAYYFMRFRRAFGEYS

SEQ ID NO: 21844 - protein, 13 aa, Severe acute respiratory syndrome coronavirus 2
  REGION 1..13: note = Table B: HLA-DRB1*11:02L
IAYIICISTKHFY

SEQ ID NO: 21845 - protein, 16 aa, Severe acute respiratory syndrome coronavirus 2
  REGION 1..16: note = Table B: HLA-DRB1*11:02L HLA-DQA1*05:05-B1*03:01L HLA-DRB1*10:01L
STKHFYWFFSNYLKRR

SEQ ID NO: 21846 - protein, 16 aa, Severe acute respiratory syndrome coronavirus 2
  REGION 1..16: note = Table B: HLA-DRB1*11:02L HLA-DRB1*14:02L HLA-DRB1*08:02L HLA-DRB1*08:03L
QSGFRKMAFPSGKVEG

SEQ ID NO: 21847 - protein, 16 aa, Severe acute respiratory syndrome coronavirus 2
  REGION 1..16: note = Table B: HLA-DRB1*11:02L HLA-DRB4*01:01L HLA-DQA1*01:03-B1*06:01L
LNGLWLDDVVYCPRHV

SEQ ID NO: 21848 - protein, 17 aa, Severe acute respiratory syndrome coronavirus 2
  REGION 1..17: note = Table B: HLA-DRB1*11:02L HLA-DRB1*14:02L HLA-DPA1*01:03-B1*104:01L HLA-DRB1*08:02L
NPNYEDLLIRKSNHNFL

SEQ ID NO: 21849 - protein, 15 aa, Severe acute respiratory syndrome coronavirus 2
  REGION 1..15: note = Table B: HLA-DRB1*11:02L
SNHNFLVQAGNVQLR

SEQ ID NO: 21850 - protein, 16 aa, Severe acute respiratory syndrome coronavirus 2
  REGION 1..16: note = Table B: HLA-DRB1*11:02L
HNFLVQAGNVQLRVIG

SEQ ID NO: 21851 - protein, 11 aa, Severe acute respiratory syndrome coronavirus 2
  REGION 1..11: note = Table B: HLA-DRB1*11:02L
VDTANPKTPKY

SEQ ID NO: 21852 - protein, 16 aa, Severe acute respiratory syndrome coronavirus 2
  REGION 1..16: note = Table B: HLA-DRB1*11:02L HLA-DRB4*01:01L HLA-DQA1*05:05-B1*03:116L HLA-DRB1*09:01L HLA-DRB1*10:01L HLA-DRB1*08:02L HLA-DRB1*08:03L
DRWFLNRFTTTLNDFN

SEQ ID NO: 21853 - protein, 15 aa, Severe acute respiratory syndrome coronavirus 2
  REGION 1..15: note = Table B: HLA-DRB1*11:02L HLA-DRB1*08:02L
EDEFTPFDVVRQCSG

SEQ ID NO: 21854 - protein, 14 aa, Severe acute respiratory syndrome coronavirus 2
  REGION 1..14: note = Table B: HLA-DRB1*11:02L HLA-DRB1*13:01L HLA-DPA1*02:01-B1*13:01L
AFAMMFVKHKHAFL

SEQ ID NO: 21855 - protein, 16 aa, Severe acute respiratory syndrome coronavirus 2
  REGION 1..16: note = Table B: HLA-DRB1*11:02L
LSVLQQLRVESSSKLW

SEQ ID NO: 21856 - protein, 14 aa, Severe acute respiratory syndrome coronavirus 2
  REGION 1..14: note = Table B: HLA-DRB1*11:02L HLA-DRB3*01:01L HLA-DPA1*01:03-B1*104:01L
LPSYAAFATAQEAY

SEQ ID NO: 21857 - protein, 15 aa, Severe acute respiratory syndrome coronavirus 2
  REGION 1..15: note = Table B: HLA-DRB1*11:02L HLA-DRB1*13:01L HLA-DRB1*08:02L
GDSEVVLKKLKKSLN

SEQ ID NO: 21858 - protein, 17 aa, Severe acute respiratory syndrome coronavirus 2
  REGION 1..17: note = Table B: HLA-DRB1*11:02L
VAKSEFDRDAAMQRKLE

SEQ ID NO: 21859 - protein, 15 aa, Severe acute respiratory syndrome coronavirus 2
  REGION 1..15: note = Table B: HLA-DRB1*11:02L HLA-DRB1*14:02L
TMLFTMLRKLDNDAL

SEQ ID NO: 21860 - protein, 15 aa, Severe acute respiratory syndrome coronavirus 2
  REGION 1..15: note = Table B: HLA-DRB1*11:02L HLA-DPA1*01:03-B1*02:01L
IQQVVDADSKIVQLS

SEQ ID NO: 21861 - protein, 16 aa, Severe acute respiratory syndrome coronavirus 2
  REGION 1..16: note = Table B: HLA-DRB1*11:02L HLA-DRB1*13:01L HLA-DPA1*01:03-B1*02:01L HLA-DRB1*08:02L
SKIVQLSEISMDNSPN

SEQ ID NO: 21862 - protein, 13 aa, Severe acute respiratory syndrome coronavirus 2
  REGION 1..13: note = Table B: HLA-DRB1*11:02L HLA-DRB1*04:10L HLA-DRB1*09:01L HLA-DPA1*03:01-B1*105:01L HLA-DRB1*08:03L
TALRANSAVKLQN

SEQ ID NO: 21863 - protein, 14 aa, Severe acute respiratory syndrome coronavirus 2
  REGION 1..14: note = Table B: HLA-DRB1*11:02L HLA-DPA1*01:03-B1*02:01L
NALAYYNTTKGGRF

SEQ ID NO: 21864 - protein, 13 aa, Severe acute respiratory syndrome coronavirus 2
  REGION 1..13: note = Table B: HLA-DRB1*11:02L HLA-DPA1*01:03-B1*02:01L HLA-DRB1*15:01L
LAYYNTTKGGRFV

SEQ ID NO: 21865 - protein, 16 aa, Severe acute respiratory syndrome coronavirus 2
  REGION 1..16: note = Table B: HLA-DRB1*11:02L
YLYFIKGLNNLNRGMV

SEQ ID NO: 21866 - protein, 16 aa, Severe acute respiratory syndrome coronavirus 2
  REGION 1..16: note = Table B: HLA-DRB1*11:02L HLA-DRB1*14:02L HLA-DPA1*01:03-B1*04:02L
IKGLNNLNRGMVLGSL

SEQ ID NO: 21867 - protein, 13 aa, Severe acute respiratory syndrome coronavirus 2
  REGION 1..13: note = Table B: HLA-DRB1*11:02L HLA-DQA1*05:05-B1*03:116L HLA-DPA1*01:03-B1*04:02L HLA-DRB3*01:01L HLA-DRB1*08:02L HLA-DRB1*15:03L
GSLAATVRLQAGN

SEQ ID NO: 21868 - protein, 12 aa, Severe acute respiratory syndrome coronavirus 2
  REGION 1..12: note = Table B: HLA-DRB1*11:02L HLA-DRB1*09:01L HLA-DRB1*07:01L
AFAVDAAKAYKD

SEQ ID NO: 21869 - protein, 13 aa, Severe acute respiratory syndrome coronavirus 2
  REGION 1..13: note = Table B: HLA-DRB1*11:02L HLA-DRB1*13:01L
YKDYLASGGQPIT

SEQ ID NO: 21870 - protein, 16 aa, Severe acute respiratory syndrome coronavirus 2
  REGION 1..16: note = Table B: HLA-DRB1*11:02L
TGQAITVTPEANMDQE

SEQ ID NO: 21871 - protein, 12 aa, Severe acute respiratory syndrome coronavirus 2
  REGION 1..12: note = Table B: HLA-DRB1*11:02L HLA-DQA1*01-B1*05L HLA-DPA1*01:03-B1*104:01L HLA-DRB1*16:01L
STDVVYRAFDIY

SEQ ID NO: 21872 - protein, 16 aa, Severe acute respiratory syndrome coronavirus 2
  REGION 1..16: note = Table B: HLA-DRB1*11:02L HLA-DRB4*01:01L HLA-DRB1*09:01L
DVVYRAFDIYNDKVAG

SEQ ID NO: 21873 - protein, 16 aa, Severe acute respiratory syndrome coronavirus 2
  REGION 1..16: note = Table B: HLA-DRB1*11:02L HLA-DRB1*14:02L
DDNLIDSYFVVKRHTF

SEQ ID NO: 21874 - protein, 16 aa, Severe acute respiratory syndrome coronavirus 2
  REGION 1..16: note = Table B: HLA-DRB1*11:02L HLA-DQA1*05:05-B1*03:19L HLA-DQA1*05:01-B1*02:01L HLA-DPA1*01:03-B1*104:01L
DNLIDSYFVVKRHTFS

SEQ ID NO: 21875 - protein, 13 aa, Severe acute respiratory syndrome coronavirus 2
  REGION 1..13: note = Table B: HLA-DRB1*11:02L HLA-DRB1*14:02L HLA-DQA1*05:05-B1*03:116L HLA-DRB1*08:02L
DSYFVVKRHTFSN

SEQ ID NO: 21876 - protein, 15 aa, Severe acute respiratory syndrome coronavirus 2
  REGION 1..15: note = Table B: HLA-DRB1*11:02L HLA-DRB1*11:01L HLA-DRB3*01:01L
RHTFSNYQHEETIYN

SEQ ID NO: 21877 - protein, 16 aa, Severe acute respiratory syndrome coronavirus 2
  REGION 1..16: note = Table B: HLA-DRB1*11:02L HLA-DPA1*01:03-B1*104:01L
TIYNLLKDCPAVAKHD

SEQ ID NO: 21878 - protein, 14 aa, Severe acute respiratory syndrome coronavirus 2
  REGION 1..14: note = Table B: HLA-DRB1*11:02L HLA-DPA1*02:01-B1*13:01L HLA-DRB1*08:02L HLA-DRB1*15:03L
MADLVYALRHFDEG

SEQ ID NO: 21879 - protein, 14 aa, Severe acute respiratory syndrome coronavirus 2
  REGION 1..14: note = Table B: HLA-DRB1*11:02L HLA-DRB1*14:02L HLA-DQA1*05:05-B1*03:19L HLA-DPA1*01:03-B1*04:02L HLA-DQA1*05:05-B1*03:01L HLA-DRB1*08:02L
ADLVYALRHFDEGN

SEQ ID NO: 21880 - protein, 12 aa, Severe acute respiratory syndrome coronavirus 2
  REGION 1..12: note = Table B: HLA-DRB1*11:02L HLA-DRB1*14:02L HLA-DQA1*05:05-B1*03:116L HLA-DPA1*01:03-B1*04:02L HLA-DRB1*12:01L
TLDNQDLNGNWY

SEQ ID NO: 21881 - protein, 16 aa, Severe acute respiratory syndrome coronavirus 2
  REGION 1..16: note = Table B: HLA-DRB1*11:02L
DFGDFIQTTPGSGVPV

SEQ ID NO: 21882 - protein, 16 aa, Severe acute respiratory syndrome coronavirus 2
  REGION 1..16: note = Table B: HLA-DRB1*11:02L HLA-DPA1*01:03-B1*04:01L
GDFIQTTPGSGVPVVD

SEQ ID NO: 21883 - protein, 18 aa, Severe acute respiratory syndrome coronavirus 2
  REGION 1..18: note = Table B: HLA-DRB1*11:02L
TKPYIKWDLLKYDFTEER

SEQ ID NO: 21884 - protein, 12 aa, Severe acute respiratory syndrome coronavirus 2
  REGION 1..12: note = Table B: HLA-DRB1*11:02L HLA-DRB1*12:01L HLA-DPA1*01:03-B1*104:01L
FTEERLKLFDRY

SEQ ID NO: 21885 - protein, 19 aa, Severe acute respiratory syndrome coronavirus 2
  REGION 1..19: note = Table B: HLA-DRB1*11:02L HLA-DRB1*14:02L HLA-DRB1*08:03L
PPTSFGPLVRKIFVDGVPF

SEQ ID NO: 21886 - protein, 15 aa, Severe acute respiratory syndrome coronavirus 2
  REGION 1..15: note = Table B: HLA-DRB1*11:02L HLA-DPA1*01:03-B1*02:01L
VPFVVSTGYHFRELG

SEQ ID NO: 21887 - protein, 15 aa, Severe acute respiratory syndrome coronavirus 2
  REGION 1..15: note = Table B: HLA-DRB1*11:02L HLA-DRB1*09:01L HLA-DPA1*01:03-B1*02:01L
YHFRELGVVHNQDVN

SEQ ID NO: 21888 - protein, 16 aa, Severe acute respiratory syndrome coronavirus 2
  REGION 1..16: note = Table B: HLA-DRB1*11:02L HLA-DRB1*11:03L HLA-DRB1*14:02L HLA-DRB1*07:01L HLA-DRB1*08:02L HLA-DRB1*08:03L
SRLSFKELLVYAADPA

SEQ ID NO: 21889 - protein, 14 aa, Severe acute respiratory syndrome coronavirus 2
  REGION 1..14: note = Table B: HLA-DRB1*11:02L HLA-DRB1*11:01L HLA-DPA1*01:03-B1*02:01L
FKELLVYAADPAMH

SEQ ID NO: 21890 - protein, 13 aa, Severe acute respiratory syndrome coronavirus 2
  REGION 1..13: note = Table B: HLA-DRB1*11:02L HLA-DPA1*01:03-B1*04:01L HLA-DPA1*01:03-B1*104:01L
LLVYAADPAMHAA

SEQ ID NO: 21891 - protein, 13 aa, Severe acute respiratory syndrome coronavirus 2
  REGION 1..13: note = Table B: HLA-DRB1*11:02L HLA-DRB4*02:01NL HLA-DPA1*01:03-B1*104:01L HLA-DRB1*08:02L HLA-DRB1*15:01L
LVYAADPAMHAAS

SEQ ID NO: 21892 - protein, 16 aa, Severe acute respiratory syndrome coronavirus 2
  REGION 1..16: note = Table B: HLA-DRB1*11:02L HLA-DRB1*08:03L
KDFYDFAVSKGFFKEG

SEQ ID NO: 21893 - protein, 15 aa, Severe acute respiratory syndrome coronavirus 2
  REGION 1..15: note = Table B: HLA-DRB1*11:02L HLA-DPA1*01:03-B1*04:02L HLA-DPA1*01:03-B1*104:01L HLA-DRB1*08:02L
LKHFFFAQDGNAAIS

SEQ ID NO: 21894 - protein, 14 aa, Severe acute respiratory syndrome coronavirus 2
  REGION 1..14: note = Table B: HLA-DRB1*11:02L HLA-DRB1*08:01L HLA-DPA1*01:03-B1*04:02L HLA-DPA1*02:01-B1*13:01L HLA-DPA1*01:03-B1*104:01L HLA-DRB1*07:01L HLA-DQA1*01:03-B1*06:01L HLA-DRB1*08:02L
HFFFAQDGNAAISD

SEQ ID NO: 21895 - protein, 13 aa, Severe acute respiratory syndrome coronavirus 2
  REGION 1..13: note = Table B: HLA-DRB1*11:02L HLA-DPA1*01:03-B1*04:01L HLA-DRB1*15:01L
NQVIVNNLDKSAG

SEQ ID NO: 21896 - protein, 14 aa, Severe acute respiratory syndrome coronavirus 2
  REGION 1..14: note = Table B: HLA-DRB1*11:02L
QVIVNNLDKSAGFP

SEQ ID NO: 21897 - protein, 15 aa, Severe acute respiratory syndrome coronavirus 2
  REGION 1..15: note = Table B: HLA-DRB1*11:02L HLA-DRB1*14:02L
GFPFNKWGKARLYYD

SEQ ID NO: 21898 - protein, 18 aa, Severe acute respiratory syndrome coronavirus 2
  REGION 1..18: note = Table B: HLA-DRB1*11:02L
GKARLYYDSMSYEDQDAL

SEQ ID NO: 21899 - protein, 12 aa, Severe acute respiratory syndrome coronavirus 2
  REGION 1..12: note = Table B: HLA-DRB1*11:02L HLA-DRB1*13:01L HLA-DQA1*05:05-B1*03:116L
LFAYTKRNVIPT

SEQ ID NO: 21900 - protein, 14 aa, Severe acute respiratory syndrome coronavirus 2
  REGION 1..14: note = Table B: HLA-DRB1*11:02L HLA-DPA1*01:03-B1*104:01L
FAYTKRNVIPTITQ

SEQ ID NO: 21901 - protein, 13 aa, Severe acute respiratory syndrome coronavirus 2
  REGION 1..13: note = Table B: HLA-DRB1*11:02L HLA-DRB1*14:02L HLA-DQA1*05:05-B1*03:19L HLA-DQA1*05:05-B1*03:116L HLA-DPA1*01:03-B1*04:02L HLA-DQA1*05:05-B1*03:01L HLA-DRB1*08:02L
LKYAISAKNRART

SEQ ID NO: 21902 - protein, 11 aa, Severe acute respiratory syndrome coronavirus 2
  REGION 1..11: note = Table B: HLA-DRB1*11:02L
ATVVIGTSKFY

SEQ ID NO: 21903 - protein, 14 aa, Severe acute respiratory syndrome coronavirus 2
  REGION 1..14: note = Table B: HLA-DRB1*11:02L HLA-DRB1*13:01L
VNALLSTDGNKIAD

SEQ ID NO: 21904 - protein, 14 aa, Severe acute respiratory syndrome coronavirus 2
  REGION 1..14: note = Table B: HLA-DRB1*11:02L HLA-DRB1*13:01L HLA-DRB4*01:01L HLA-DPA1*01:03-B1*04:02L HLA-DRB1*08:02L
NALLSTDGNKIADK

SEQ ID NO: 21905 - protein, 17 aa, Severe acute respiratory syndrome coronavirus 2
  REGION 1..17: note = Table B: HLA-DRB1*11:02L
NLQHRLYECLYRNRDVD

SEQ ID NO: 21906 - protein, 15 aa, Severe acute respiratory syndrome coronavirus 2
  REGION 1..15: note = Table B: HLA-DRB1*11:02L HLA-DRB1*14:02L HLA-DQA1*05:05-B1*03:116L HLA-DRB1*08:02L
HRLYECLYRNRDVDT

SEQ ID NO: 21907 - protein, 14 aa, Severe acute respiratory syndrome coronavirus 2
  REGION 1..14: note = Table B: HLA-DRB1*11:02L HLA-DQA1*05:05-B1*03:116L
VNEFYAYLRKHFSM

SEQ ID NO: 21908 - protein, 15 aa, Severe acute respiratory syndrome coronavirus 2
  REGION 1..15: note = Table B: HLA-DRB1*11:02L
IKNFKSVLYYQNNVF

SEQ ID NO: 21909 - protein, 14 aa, Severe acute respiratory syndrome coronavirus 2
  REGION 1..14: note = Table B: HLA-DRB1*11:02L HLA-DRB1*11:03L HLA-DRB1*14:02L HLA-DRB1*08:01L HLA-DRB4*01:01L HLA-DPA1*01:03-B1*04:01L HLA-DRB1*09:01L HLA-DPA1*01:03-B1*02:01L HLA-DPA1*01:03-B1*104:01L HLA-DRB1*07:01L HLA-DRB1*10:01L
  REGION 1..14: note = CONT. FROM ABOVE: HLA-DRB1*08:03L
SVLYYQNNVFMSEA

SEQ ID NO: 21910 - protein, 15 aa, Severe acute respiratory syndrome coronavirus 2
  REGION 1..15: note = Table B: HLA-DRB1*11:02L
DGTLMIERFVSLAID

SEQ ID NO: 21911 - protein, 18 aa, Severe acute respiratory syndrome coronavirus 2
  REGION 1..18: note = Table B: HLA-DRB1*11:02L HLA-DRB4*01:01L HLA-DRB1*09:01L
DAYPLTKHPNQEYADVFH

SEQ ID NO: 21912 - protein, 15 aa, Severe acute respiratory syndrome coronavirus 2
  REGION 1..15: note = Table B: HLA-DRB1*11:02L HLA-DRB1*14:02L
HLYLQYIRKLHDELT

SEQ ID NO: 21913 - protein, 11 aa, Severe acute respiratory syndrome coronavirus 2
  REGION 1..11: note = Table B: HLA-DRB1*11:02L HLA-DRB1*08:02L
DELTGHMLDMY

SEQ ID NO: 21914 - protein, 15 aa, Severe acute respiratory syndrome coronavirus 2
  REGION 1..15: note = Table B: HLA-DRB1*11:02L HLA-DQA1*05:05-B1*03:19L HLA-DPA1*01:03-B1*04:02L
GGMSYYCKSHKPPIS

SEQ ID NO: 21915 - protein, 15 aa, Severe acute respiratory syndrome coronavirus 2
  REGION 1..15: note = Table B: HLA-DRB1*11:02L HLA-DRB1*14:02L HLA-DQA1*05:05-B1*03:19L HLA-DPA1*02:01-B1*13:01L
GQVFGLYKNTCVGSD

SEQ ID NO: 21916 - protein, 14 aa, Severe acute respiratory syndrome coronavirus 2
  REGION 1..14: note = Table B: HLA-DRB1*11:02L
AGDYILANTCTERL

SEQ ID NO: 21917 - protein, 15 aa, Severe acute respiratory syndrome coronavirus 2
  REGION 1..15: note = Table B: HLA-DRB1*11:02L HLA-DRB1*11:03L HLA-DRB1*09:01L HLA-DPA1*01:03-B1*104:01L HLA-DRB1*08:03L
ERLKLFAAETLKATE

SEQ ID NO: 21918 - protein, 15 aa, Severe acute respiratory syndrome coronavirus 2
  REGION 1..15: note = Table B: HLA-DRB1*11:02L HLA-DQA1*05:05-B1*03:116L
RLKLFAAETLKATEE

SEQ ID NO: 21919 - protein, 14 aa, Severe acute respiratory syndrome coronavirus 2
  REGION 1..14: note = Table B: HLA-DRB1*11:02L
TGYRVTKNSKVQIG

SEQ ID NO: 21920 - protein, 15 aa, Severe acute respiratory syndrome coronavirus 2
  REGION 1..15: note = Table B: HLA-DRB1*11:02L
GYRVTKNSKVQIGEY

SEQ ID NO: 21921 - protein, 14 aa, Severe acute respiratory syndrome coronavirus 2
  REGION 1..14: note = Table B: HLA-DRB1*11:02L HLA-DRB4*02:01NL HLA-DRB1*13:01L HLA-DPA1*01:03-B1*02:01L HLA-DRB1*08:02L HLA-DRB1*15:01L
IGEYTFEKGDYGDA

SEQ ID NO: 21922 - protein, 14 aa, Severe acute respiratory syndrome coronavirus 2
  REGION 1..14: note = Table B: HLA-DRB1*11:02L HLA-DQA1*01:01-B1*05:01L HLA-DRB1*04:10L HLA-DPA1*01:03-B1*02:01L HLA-DRB1*08:03L
DAVVYRGTTTYKLN

SEQ ID NO: 21923 - protein, 16 aa, Severe acute respiratory syndrome coronavirus 2
  REGION 1..16: note = Table B: HLA-DRB1*11:02L
TSHTVMPLSAPTLVPQ

SEQ ID NO: 21924 - protein, 15 aa, Severe acute respiratory syndrome coronavirus 2
  REGION 1..15: note = Table B: HLA-DRB1*11:02L
RIVYTACSHAAVDAL

SEQ ID NO: 21925 - protein, 16 aa, Severe acute respiratory syndrome coronavirus 2
  REGION 1..16: note = Table B: HLA-DRB1*11:02L HLA-DQA1*05:05-B1*03:116L
AKHYVYIGDPAQLPAP

SEQ ID NO: 21926 - protein, 14 aa, Severe acute respiratory syndrome coronavirus 2
  REGION 1..14: note = Table B: HLA-DRB1*11:02L HLA-DRB4*01:01L HLA-DPA1*01:03-B1*04:01L HLA-DRB1*15:01L
YVYIGDPAQLPAPR

SEQ ID NO: 21927 - protein, 14 aa, Severe acute respiratory syndrome coronavirus 2
  REGION 1..14: note = Table B: HLA-DRB1*11:02L HLA-DRB5*01:01L HLA-DQA1*05:05-B1*03:19L HLA-DPA1*01:03-B1*04:02L HLA-DRB1*07:01L HLA-DRB1*08:02L HLA-DRB1*15:01L
VSALVYDNKLKAHK

SEQ ID NO: 21928 - protein, 18 aa, Severe acute respiratory syndrome coronavirus 2
  REGION 1..18: note = Table B: HLA-DRB1*11:02L HLA-DRB1*14:02L
SAQCFKMFYKGVITHDVS

SEQ ID NO: 21929 - protein, 13 aa, Severe acute respiratory syndrome coronavirus 2
  REGION 1..13: note = Table B: HLA-DRB1*11:02L HLA-DPA1*01:03-B1*02:01L HLA-DPA1*01:03-B1*104:01L HLA-DRB1*08:02L HLA-DRB1*15:01L
KGVITHDVSSAIN

SEQ ID NO: 21930 - protein, 14 aa, Severe acute respiratory syndrome coronavirus 2
  REGION 1..14: note = Table B: HLA-DRB1*11:02L HLA-DPA1*01:03-B1*02:01L HLA-DPA1*01:03-B1*104:01L HLA-DRB1*08:02L HLA-DRB1*15:01L
GVITHDVSSAINRP

SEQ ID NO: 21931 - protein, 17 aa, Severe acute respiratory syndrome coronavirus 2
  REGION 1..17: note = Table B: HLA-DRB1*11:02L
NPAWRKAVFISPYNSQN

SEQ ID NO: 21932 - protein, 14 aa, Severe acute respiratory syndrome coronavirus 2
  REGION 1..14: note = Table B: HLA-DRB1*11:02L HLA-DQA1*05:05-B1*03:116L
ISPYNSQNAVASKI

SEQ ID NO: 21933 - protein, 16 aa, Severe acute respiratory syndrome coronavirus 2
  REGION 1..16: note = Table B: HLA-DRB1*11:02L HLA-DPA1*01:03-B1*04:01L HLA-DPA1*01:03-B1*04:02L
SKILGLPTQTVDSSQG

SEQ ID NO: 21934 - protein, 11 aa, Severe acute respiratory syndrome coronavirus 2
  REGION 1..11: note = Table B: HLA-DRB1*11:02L
VDSSQGSEYDY

SEQ ID NO: 21935 - protein, 14 aa, Severe acute respiratory syndrome coronavirus 2
  REGION 1..14: note = Table B: HLA-DRB1*11:02L HLA-DRB4*02:01NL HLA-DPA1*01:03-B1*04:01L HLA-DQA1*05:05-B1*03:116L HLA-DRB1*15:01L
DYVIFTQTTETAHS

SEQ ID NO: 21936 - protein, 17 aa, Severe acute respiratory syndrome coronavirus 2
  REGION 1..17: note = Table B: HLA-DRB1*11:02L
DKLQFTSLEIPRRNVAT

SEQ ID NO: 21937 - protein, 18 aa, Severe acute respiratory syndrome coronavirus 2
  REGION 1..18: note = Table B: HLA-DRB1*11:02L HLA-DRB1*14:02L HLA-DQA1*05:05-B1*03:19L HLA-DPA1*01:03-B1*04:02L
VTGLFKDCSKVITGLHPT

SEQ ID NO: 21938 - protein, 15 aa, Severe acute respiratory syndrome coronavirus 2
  REGION 1..15: note = Table B: HLA-DRB1*11:02L
KMNYQVNGYPNMFIT

SEQ ID NO: 21939 - protein, 16 aa, Severe acute respiratory syndrome coronavirus 2
  REGION 1..16: note = Table B: HLA-DRB1*11:02L
NYQVNGYPNMFITREE

SEQ ID NO: 21940 - protein, 16 aa, Severe acute respiratory syndrome coronavirus 2
  REGION 1..16: note = Table B: HLA-DRB1*11:02L HLA-DRB1*13:01L HLA-DPA1*01:03-B1*04:02L
YPNMFITREEAIRHVR

SEQ ID NO: 21941 - protein, 15 aa, Severe acute respiratory syndrome coronavirus 2
  REGION 1..15: note = Table B: HLA-DRB1*11:02L HLA-DRB1*11:01L HLA-DRB1*08:03L
DRVVFVLWAHGFELT

SEQ ID NO: 21942 - protein, 16 aa, Severe acute respiratory syndrome coronavirus 2
  REGION 1..16: note = Table B: HLA-DRB1*11:02L
VVFVLWAHGFELTSMK

SEQ ID NO: 21943 - protein, 17 aa, Severe acute respiratory syndrome coronavirus 2
  REGION 1..17: note = Table B: HLA-DRB1*11:02L HLA-DQA1*05:05-B1*03:19L HLA-DQA1*05:01-B1*02:01L
VQHMVVKAALLADKFPV

SEQ ID NO: 21944 - protein, 17 aa, Severe acute respiratory syndrome coronavirus 2
  REGION 1..17: note = Table B: HLA-DRB1*11:02L
VKAALLADKFPVLHDIG

SEQ ID NO: 21945 - protein, 14 aa, Severe acute respiratory syndrome coronavirus 2
  REGION 1..14: note = Table B: HLA-DRB1*11:02L HLA-DRB1*13:01L HLA-DQA1*05:05-B1*03:116L HLA-DRB1*08:02L HLA-DRB1*15:01L
TPAFDKSAFVNLKQ

SEQ ID NO: 21946 - protein, 13 aa, Severe acute respiratory syndrome coronavirus 2
  REGION 1..13: note = Table B: HLA-DRB1*11:02L HLA-DPA1*01:03-B1*02:01L HLA-DRB1*08:02L
DKSAFVNLKQLPF

SEQ ID NO: 21947 - protein, 13 aa, Severe acute respiratory syndrome coronavirus 2
  REGION 1..13: note = Table B: HLA-DRB1*11:02L HLA-DRB1*08:02L
KSAFVNLKQLPFF

SEQ ID NO: 21948 - protein, 12 aa, Severe acute respiratory syndrome coronavirus 2
  REGION 1..12: note = Table B: HLA-DRB1*11:02L
AFVNLKQLPFFY

SEQ ID NO: 21949 - protein, 12 aa, Severe acute respiratory syndrome coronavirus 2
  REGION 1..12: note = Table B: HLA-DRB1*11:02L
FVNLKQLPFFYY

SEQ ID NO: 21950 - protein, 14 aa, Severe acute respiratory syndrome coronavirus 2
  REGION 1..14: note = Table B: HLA-DRB1*11:02L
GFSLWVYKQFDTYN

SEQ ID NO: 21951 - protein, 15 aa, Severe acute respiratory syndrome coronavirus 2
  REGION 1..15: note = Table B: HLA-DRB1*11:02L
SLWVYKQFDTYNLWN

SEQ ID NO: 21952 - protein, 14 aa, Severe acute respiratory syndrome coronavirus 2
  REGION 1..14: note = Table B: HLA-DRB1*11:02L HLA-DRB1*08:02L HLA-DRB1*08:03L
LENVAFNVVNKGHF

SEQ ID NO: 21953 - protein, 15 aa, Severe acute respiratory syndrome coronavirus 2
  REGION 1..15: note = Table B: HLA-DRB1*11:02L HLA-DRB1*11:01L HLA-DRB3*01:01L HLA-DPA1*01:03-B1*02:01L
VPVSIINNTVYTKVD

SEQ ID NO: 21954 - protein, 16 aa, Severe acute respiratory syndrome coronavirus 2
  REGION 1..16: note = Table B: HLA-DRB1*11:02L
VSIINNTVYTKVDGVD

SEQ ID NO: 21955 - protein, 14 aa, Severe acute respiratory syndrome coronavirus 2
  REGION 1..14: note = Table B: HLA-DRB1*11:02L
ELFENKTTLPVNVA

SEQ ID NO: 21956 - protein, 15 aa, Severe acute respiratory syndrome coronavirus 2
  REGION 1..15: note = Table B: HLA-DRB1*11:02L HLA-DPA1*01:03-B1*04:02L
TVIWDYKRDAPAHIS

SEQ ID NO: 21957 - protein, 13 aa, Severe acute respiratory syndrome coronavirus 2
  REGION 1..13: note = Table B: HLA-DRB1*11:02L
WDYKRDAPAHIST

SEQ ID NO: 21958 - protein, 14 aa, Severe acute respiratory syndrome coronavirus 2
  REGION 1..14: note = Table B: HLA-DRB1*11:02L HLA-DQA1*01:01-B1*05:01L HLA-DRB4*01:01L
DYKRDAPAHISTIG

SEQ ID NO: 21959 - protein, 16 aa, Severe acute respiratory syndrome coronavirus 2
  REGION 1..16: note = Table B: HLA-DRB1*11:02L HLA-DPA1*01:03-B1*04:02L HLA-DPA1*01:03-B1*104:01L
VDLFRNARNGVLITEG

SEQ ID NO: 21960 - protein, 17 aa, Severe acute respiratory syndrome coronavirus 2
  REGION 1..17: note = Table B: HLA-DRB1*11:02L HLA-DRB1*10:01L
PETYFTQSRNLQEFKPR

SEQ ID NO: 21961 - protein, 16 aa, Severe acute respiratory syndrome coronavirus 2
  REGION 1..16: note = Table B: HLA-DRB1*11:02L HLA-DRB1*11:03L HLA-DRB1*12:01L
LHLLIGLAKRFKESPF

SEQ ID NO: 21962 - protein, 16 aa, Severe acute respiratory syndrome coronavirus 2
  REGION 1..16: note = Table B: HLA-DRB1*11:02L HLA-DRB1*14:02L HLA-DPA1*01:03-B1*04:02L HLA-DPA1*03:01-B1*105:01L HLA-DRB1*08:02L
HLLIGLAKRFKESPFE

SEQ ID NO: 21963 - protein, 16 aa, Severe acute respiratory syndrome coronavirus 2
  REGION 1..16: note = Table B: HLA-DRB1*11:02L
SPFELEDFIPMDSTVK

SEQ ID NO: 21964 - protein, 12 aa, Severe acute respiratory syndrome coronavirus 2
  REGION 1..12: note = Table B: HLA-DRB1*11:02L HLA-DQA1*05:05-B1*03:116L
YFITDAQTGSSK

SEQ ID NO: 21965 - protein, 17 aa, Severe acute respiratory syndrome coronavirus 2
  REGION 1..17: note = Table B: HLA-DRB1*11:02L
VIDLLLDDFVEIIKSQD

SEQ ID NO: 21966 - protein, 14 aa, Severe acute respiratory syndrome coronavirus 2
  REGION 1..14: note = Table B: HLA-DRB1*11:02L HLA-DRB4*01:01L
DFVEIIKSQDLSVV

SEQ ID NO: 21967 - protein, 20 aa, Severe acute respiratory syndrome coronavirus 2
  REGION 1..20: note = Table B: HLA-DRB1*11:02L
DGHVETFYPKLQSSQAWQPG

SEQ ID NO: 21968 - protein, 18 aa, Severe acute respiratory syndrome coronavirus 2
  REGION 1..18: note = Table B: HLA-DRB1*11:02L HLA-DQA1*05:05-B1*03:116L
LPTGTLLVDSDLNDFVSD

SEQ ID NO: 21969 - protein, 18 aa, Severe acute respiratory syndrome coronavirus 2
  REGION 1..18: note = Table B: HLA-DRB1*11:02L
ISDMYDPKTKNVTKENDS

SEQ ID NO: 21970 - protein, 17 aa, Severe acute respiratory syndrome coronavirus 2
  REGION 1..17: note = Table B: HLA-DRB1*11:02L HLA-DQA1*05:01-B1*02:01L HLA-DPA1*01:03-B1*104:01L HLA-DRB1*07:01L
DSKEGFFTYICGFIQQK

SEQ ID NO: 21971 - protein, 16 aa, Severe acute respiratory syndrome coronavirus 2
  REGION 1..16: note = Table B: HLA-DRB1*11:02L
IDGYVMHANYIFWRNT

SEQ ID NO: 21972 - protein, 18 aa, Severe acute respiratory syndrome coronavirus 2
  REGION 1..18: note = Table B: HLA-DRB1*11:02L
NPIQLSSYSLFDMSKFPL

SEQ ID NO: 21973 - protein, 14 aa, Severe acute respiratory syndrome coronavirus 2
  REGION 1..14: note = Table B: HLA-DRB1*11:02L HLA-DRB1*13:01L HLA-DPA1*01:03-B1*04:02L HLA-DPA1*02:01-B1*13:01L HLA-DPA1*01:03-B1*104:01L HLA-DQA1*05:05-B1*03:01L HLA-DRB1*07:01L HLA-DQA1*01:03-B1*06:01L HLA-DRB1*08:02L
  REGION 1..14: note = CONT. FROM ABOVE: HLA-DRB1*08:03L
LIIRENNRVVISSD

SEQ ID NO: 21974 - protein, 13 aa, Severe acute respiratory syndrome coronavirus 2
  REGION 1..13: note = Table B: HLA-DRB1*11:02L
GVYYPDKVFRSSV

SEQ ID NO: 21975 - protein, 15 aa, Severe acute respiratory syndrome coronavirus 2
  REGION 1..15: note = Table B: HLA-DRB1*11:02L HLA-DPA1*01:03-B1*04:01L
SNVTWFHAIHVSGTN

SEQ ID NO: 21976 - protein, 16 aa, Severe acute respiratory syndrome coronavirus 2
  REGION 1..16: note = Table B: HLA-DRB1*11:02L
NDPFLGVYYHKNNKSW

SEQ ID NO: 21977 - protein, 16 aa, Severe acute respiratory syndrome coronavirus 2
  REGION 1..16: note = Table B: HLA-DRB1*11:02L HLA-DRB1*08:02L
DPFLGVYYHKNNKSWM

SEQ ID NO: 21978 - protein, 18 aa, Severe acute respiratory syndrome coronavirus 2
  REGION 1..18: note = Table B: HLA-DRB1*11:02L
VSQPFLMDLEGKQGNFKN

SEQ ID NO: 21979 - protein, 17 aa, Severe acute respiratory syndrome coronavirus 2
  REGION 1..17: note = Table B: HLA-DRB1*11:02L HLA-DRB1*11:03L
VFKNIDGYFKIYSKHTP

SEQ ID NO: 21980 - protein, 14 aa, Severe acute respiratory syndrome coronavirus 2
  REGION 1..14: note = Table B: HLA-DRB1*11:02L HLA-DRB1*13:01L HLA-DPA1*01:03-B1*04:01L HLA-DPA1*01:03-B1*04:02L HLA-DPA1*01:03-B1*02:01L HLA-DPA1*01:02-B1*04:01L
TPINLVRDLPQGFS

SEQ ID NO: 21981 - protein, 17 aa, Severe acute respiratory syndrome coronavirus 2
  REGION 1..17: note = Table B: HLA-DRB1*11:02L
LPIGINITRFQTLLALH

SEQ ID NO: 21982 - protein, 19 aa, Severe acute respiratory syndrome coronavirus 2
  REGION 1..19: note = Table B: HLA-DRB1*11:02L
PIGINITRFQTLLALHRSY

SEQ ID NO: 21983 - protein, 14 aa, Severe acute respiratory syndrome coronavirus 2
  REGION 1..14: note = Table B: HLA-DRB1*11:02L
AAAYYVGYLQPRTF

SEQ ID NO: 21984 - protein, 14 aa, Severe acute respiratory syndrome coronavirus 2
  REGION 1..14: note = Table B: HLA-DRB1*11:02L
AAYYVGYLQPRTFL

SEQ ID NO: 21985 - protein, 13 aa, Severe acute respiratory syndrome coronavirus 2
  REGION 1..13: note = Table B: HLA-DRB1*11:02L HLA-DQA1*01:01-B1*05:01L HLA-DRB5*01:01L HLA-DRB4*02:01NL HLA-DRB1*08:02L
GIYQTSNFRVQPT

SEQ ID NO: 21986 - protein, 16 aa, Severe acute respiratory syndrome coronavirus 2
  REGION 1..16: note = Table B: HLA-DRB1*11:02L HLA-DPA1*01:03-B1*104:01L
SASFSTFKCYGVSPTK

SEQ ID NO: 21987 - protein, 16 aa, Severe acute respiratory syndrome coronavirus 2
  REGION 1..16: note = Table B: HLA-DRB1*11:02L
TNVYADSFVIRGDEVR

SEQ ID NO: 21988 - protein, 11 aa, Severe acute respiratory syndrome coronavirus 2
  REGION 1..11: note = Table B: HLA-DRB1*11:02L
LDSKVGGNYNY

SEQ ID NO: 21989 - protein, 15 aa, Severe acute respiratory syndrome coronavirus 2
  REGION 1..15: note = Table B: HLA-DRB1*11:02L HLA-DRB1*14:02L HLA-DRB1*13:01L HLA-DPA1*01:03-B1*04:02L
VGGNYNYLYRLFRKS

SEQ ID NO: 21990 - protein, 14 aa, Severe acute respiratory syndrome coronavirus 2
  REGION 1..14: note = Table B: HLA-DRB1*11:02L HLA-DRB1*14:02L HLA-DRB1*13:01L HLA-DPA1*01:03-B1*04:02L
GNYNYLYRLFRKSN

SEQ ID NO: 21991 - protein, 16 aa, Severe acute respiratory syndrome coronavirus 2
  REGION 1..16: note = Table B: HLA-DRB1*11:02L HLA-DPA1*01:03-B1*04:02L HLA-DPA1*01:03-B1*02:01L
YNYLYRLFRKSNLKPF

SEQ ID NO: 21992 - protein, 15 aa, Severe acute respiratory syndrome coronavirus 2
  REGION 1..15: note = Table B: HLA-DRB1*11:02L HLA-DPA1*03:01-B1*105:01L HLA-DRB1*08:03L
YLYRLFRKSNLKPFE

SEQ ID NO: 21993 - protein, 15 aa, Severe acute respiratory syndrome coronavirus 2
  REGION 1..15: note = Table B: HLA-DRB1*11:02L HLA-DRB1*09:01L HLA-DPA1*01:03-B1*104:01L HLA-DRB1*10:01L
GVGYQPYRVVVLSFE

SEQ ID NO: 21994 - protein, 16 aa, Severe acute respiratory syndrome coronavirus 2
  REGION 1..16: note = Table B: HLA-DRB1*11:02L
FLPFQQFGRDIADTTD

SEQ ID NO: 21995 - protein, 15 aa, Severe acute respiratory syndrome coronavirus 2
  REGION 1..15: note = Table B: HLA-DRB1*11:02L HLA-DPA1*01:03-B1*02:01L HLA-DRB1*15:01L
TPTWRVYSTGSNVFQ

SEQ ID NO: 21996 - protein, 15 aa, Severe acute respiratory syndrome coronavirus 2
  REGION 1..15: note = Table B: HLA-DRB1*11:02L HLA-DRB1*14:02L HLA-DRB1*08:01L HLA-DRB1*11:01L HLA-DPA1*02:01-B1*13:01L HLA-DRB1*07:01L
SQSIIAYTMSLGAEN

SEQ ID NO: 21997 - protein, 17 aa, Severe acute respiratory syndrome coronavirus 2
  REGION 1..17: note = Table B: HLA-DRB1*11:02L HLA-DPA1*01:03-B1*04:01L HLA-DQA1*05:05-B1*03:116L
IPTNFTISVTTEILPVS

SEQ ID NO: 21998 - protein, 16 aa, Severe acute respiratory syndrome coronavirus 2
  REGION 1..16: note = Table B: HLA-DRB1*11:02L HLA-DRB4*01:01L
VKQIYKTPPIKDFGGF

SEQ ID NO: 21999 - protein, 19 aa, Severe acute respiratory syndrome coronavirus 2
  REGION 1..19: note = Table B: HLA-DRB1*11:02L
PPIKDFGGFNFSQILPDPS

SEQ ID NO: 22000 - protein, 16 aa, Severe acute respiratory syndrome coronavirus 2
  REGION 1..16: note = Table B: HLA-DRB1*11:02L
FGGFNFSQILPDPSKP

SEQ ID NO: 22001 - protein, 14 aa, Severe acute respiratory syndrome coronavirus 2
  REGION 1..14: note = Table B: HLA-DRB1*11:02L
FNFSQILPDPSKPS

SEQ ID NO: 22002 - protein, 15 aa, Severe acute respiratory syndrome coronavirus 2
  REGION 1..15: note = Table B: HLA-DRB1*11:02L HLA-DRB1*07:01L
TDEMIAQYTSALLAG

SEQ ID NO: 22003 - protein, 16 aa, Severe acute respiratory syndrome coronavirus 2
  REGION 1..16: note = Table B: HLA-DRB1*11:02L
QKLIANQFNSAIGKIQ

SEQ ID NO: 22004 - protein, 15 aa, Severe acute respiratory syndrome coronavirus 2
  REGION 1..15: note = Table B: HLA-DRB1*11:02L HLA-DRB4*01:01L
IANQFNSAIGKIQDS

SEQ ID NO: 22005 - protein, 14 aa, Severe acute respiratory syndrome coronavirus 2
  REGION 1..14: note = Table B: HLA-DRB1*11:02L HLA-DRB1*14:02L HLA-DPA1*01:03-B1*04:02L HLA-DPA1*01:03-B1*02:01L
ALNTLVKQLSSNFG

SEQ ID NO: 22006 - protein, 14 aa, Severe acute respiratory syndrome coronavirus 2
  REGION 1..14: note = Table B: HLA-DRB1*11:02L HLA-DRB1*11:03L HLA-DRB1*14:02L HLA-DRB1*11:01L HLA-DQA1*05:05-B1*03:19L HLA-DQA1*05:05-B1*03:116L HLA-DPA1*01:03-B1*04:02L HLA-DRB3*01:01L HLA-DQA1*05:05-B1*03:01L HLA-DRB1*08:02L
DILSRLDKVEAEVQ

SEQ ID NO: 22007 - protein, 15 aa, Severe acute respiratory syndrome coronavirus 2
  REGION 1..15: note = Table B: HLA-DRB1*11:02L HLA-DRB4*01:01L HLA-DPA1*01:03-B1*04:02L HLA-DRB1*08:02L
ITGRLQSLQTYVTQQ

SEQ ID NO: 22008 - protein, 15 aa, Severe acute respiratory syndrome coronavirus 2
  REGION 1..15: note = Table B: HLA-DRB1*11:02L HLA-DRB4*01:01L HLA-DPA1*01:03-B1*04:02L
TGRLQSLQTYVTQQL

SEQ ID NO: 22009 - protein, 18 aa, Severe acute respiratory syndrome coronavirus 2
  REGION 1..18: note = Table B: HLA-DRB1*11:02L
LHVTYVPAQEKNFTTAPA

SEQ ID NO: 22010 - protein, 14 aa, Severe acute respiratory syndrome coronavirus 2
  REGION 1..14: note = Table B: HLA-DRB1*11:02L HLA-DPA1*01:03-B1*02:01L
EGVFVSNGTHWFVT

SEQ ID NO: 22011 - protein, 14 aa, Severe acute respiratory syndrome coronavirus 2
  REGION 1..14: note = Table B: HLA-DRB1*11:02L HLA-DRB1*11:04L HLA-DRB1*04:08L
GVFVSNGTHWFVTQ

SEQ ID NO: 22012 - protein, 14 aa, Severe acute respiratory syndrome coronavirus 2
  REGION 1..14: note = Table B: HLA-DRB1*11:02L HLA-DQA1*01:01-B1*05:01L HLA-DRB4*02:01NL HLA-DRB1*13:01L HLA-DPA1*01:03-B1*04:01L HLA-DPA1*01:03-B1*04:02L HLA-DPA1*02:01-B1*13:01L HLA-DPA1*01:03-B1*02:01L HLA-DPA1*01:03-B1*104:01L
  REGION 1..14: note = CONT. FROM ABOVE: HLA-DPA1*01:02-B1*04:01L HLA-DRB1*08:02L HLA-DRB1*15:01L
EPQIITTDNTFVSG

SEQ ID NO: 22013 - protein, 14 aa, Severe acute respiratory syndrome coronavirus 2
  REGION 1..14: note = Table B: HLA-DRB1*11:02L HLA-DPA1*01:03-B1*04:01L HLA-DRB3*01:01L
ISGINASVVNIQKE

SEQ ID NO: 22014 - protein, 15 aa, Severe acute respiratory syndrome coronavirus 2
  REGION 1..15: note = Table B: HLA-DRB1*11:02L
NASVVNIQKEIDRLN

SEQ ID NO: 22015 - protein, 13 aa, Severe acute respiratory syndrome coronavirus 2
  REGION 1..13: note = Table B: HLA-DRB1*11:02L HLA-DRB3*01:01L HLA-DRB1*08:02L
AVFQSASKIITLK

SEQ ID NO: 22016 - protein, 15 aa, Severe acute respiratory syndrome coronavirus 2
  REGION 1..15: note = Table B: HLA-DRB1*11:02L HLA-DRB1*08:02L
TSDYYQLYSTQLSTD

SEQ ID NO: 22017 - protein, 14 aa, Severe acute respiratory syndrome coronavirus 2
  REGION 1..14: note = Table B: HLA-DRB1*11:02L HLA-DRB1*11:01L HLA-DPA1*01:03-B1*02:01L HLA-DRB1*08:02L HLA-DRB1*15:01L
YYQLYSTQLSTDTG

SEQ ID NO: 22018 - protein, 14 aa, Severe acute respiratory syndrome coronavirus 2
  REGION 1..14: note = Table B: HLA-DRB1*11:02L HLA-DQA1*05:05-B1*03:116L HLA-DRB1*09:01L HLA-DRB3*01:01L HLA-DPA1*01:03-B1*104:01L HLA-DRB1*07:01L
VTFFIYNKIVDEPE

SEQ ID NO: 22019 - protein, 11 aa, Severe acute respiratory syndrome coronavirus 2
  REGION 1..11: note = Table B: HLA-DRB1*11:02L HLA-DQA1*05:05-B1*03:116L
IVDEPEEHVQI

SEQ ID NO: 22020 - protein, 16 aa, Severe acute respiratory syndrome coronavirus 2
  REGION 1..16: note = Table B: HLA-DRB1*11:02L
SNGTITVEELKKLLEQ

SEQ ID NO: 22021 - protein, 14 aa, Severe acute respiratory syndrome coronavirus 2
  REGION 1..14: note = Table B: HLA-DRB1*11:02L HLA-DRB1*11:03L HLA-DQA1*05:05-B1*03:116L HLA-DPA1*01:03-B1*02:01L HLA-DRB1*08:02L HLA-DRB1*08:03L
LSYFIASFRLFART

SEQ ID NO: 22022 - protein, 14 aa, Severe acute respiratory syndrome coronavirus 2
  REGION 1..14: note = Table B: HLA-DRB1*11:02L HLA-DRB1*11:03L HLA-DRB1*13:01L HLA-DPA1*01:03-B1*02:01L HLA-DRB1*08:02L
SYFIASFRLFARTR

SEQ ID NO: 22023 - protein, 16 aa, Severe acute respiratory syndrome coronavirus 2
  REGION 1..16: note = Table B: HLA-DRB1*11:02L HLA-DRB1*08:02L
AVILRGHLRIAGHHLG

SEQ ID NO: 22024 - protein, 15 aa, Severe acute respiratory syndrome coronavirus 2
  REGION 1..15: note = Table B: HLA-DRB1*11:02L
SYYKLGASQRVAGDS

SEQ ID NO: 22025 - protein, 15 aa, Severe acute respiratory syndrome coronavirus 2
  REGION 1..15: note = Table B: HLA-DRB1*11:02L HLA-DPA1*01:03-B1*02:01L
YYKLGASQRVAGDSG

SEQ ID NO: 22026 - protein, 13 aa, Severe acute respiratory syndrome coronavirus 2
  REGION 1..13: note = Table B: HLA-DRB1*11:02L HLA-DRB1*11:03L
LDYIINLIIKNLS

SEQ ID NO: 22027 - protein, 13 aa, Severe acute respiratory syndrome coronavirus 2
  REGION 1..13: note = Table B: HLA-DRB1*11:02L HLA-DRB1*08:02L
YIINLIIKNLSKS

SEQ ID NO: 22028 - protein, 14 aa, Severe acute respiratory syndrome coronavirus 2
  REGION 1..14: note = Table B: HLA-DRB1*11:02L HLA-DRB1*14:02L HLA-DQA1*05:05-B1*03:19L HLA-DPA1*02:01-B1*13:01L HLA-DQA1*05:05-B1*03:01L
IINLIIKNLSKSLT

SEQ ID NO: 22029 - protein, 18 aa, Severe acute respiratory syndrome coronavirus 2
  REGION 1..18: note = Table B: HLA-DRB1*11:02L HLA-DRB1*11:01L
LSKSLTENKYSQLDEEQP

SEQ ID NO: 22030 - protein, 16 aa, Severe acute respiratory syndrome coronavirus 2
  REGION 1..16: note = Table B: HLA-DRB1*11:02L HLA-DPA1*01:03-B1*02:01L HLA-DRB1*08:02L
SGTYEGNSPFHPLADN

SEQ ID NO: 22031 - protein, 14 aa, Severe acute respiratory syndrome coronavirus 2
  REGION 1..14: note = Table B: HLA-DRB1*11:02L
SPFHPLADNKFALT

SEQ ID NO: 22032 - protein, 13 aa, Severe acute respiratory syndrome coronavirus 2
  REGION 1..13: note = Table B: HLA-DRB1*11:02L HLA-DRB1*11:01L HLA-DRB1*08:02L
LGIITTVAAFHQE

SEQ ID NO: 22033 - protein, 11 aa, Severe acute respiratory syndrome coronavirus 2
  REGION 1..11: note = Table B: HLA-DRB1*11:02L
DEAGSKSPIQY

SEQ ID NO: 22034 - protein, 13 aa, Severe acute respiratory syndrome coronavirus 2
  REGION 1..13: note = Table B: HLA-DRB1*11:02L
SWFTALTQHGKED

SEQ ID NO: 22035 - protein, 17 aa, Severe acute respiratory syndrome coronavirus 2
  REGION 1..17: note = Table B: HLA-DRB1*11:02L HLA-DRB1*14:02L
SPDDQIGYYRRATRRIR

SEQ ID NO: 22036 - protein, 20 aa, Severe acute respiratory syndrome coronavirus 2
  REGION 1..20: note = Table B: HLA-DRB1*11:02L HLA-DRB1*14:02L HLA-DQA1*05:05-B1*03:19L
PDDQIGYYRRATRRIRGGDG

SEQ ID NO: 22037 - protein, 16 aa, Severe acute respiratory syndrome coronavirus 2
  REGION 1..16: note = Table B: HLA-DRB1*11:02L HLA-DQA1*01:01-B1*05:01L HLA-DRB4*02:01NL
DGIIWVATEGALNTPK

SEQ ID NO: 22038 - protein, 16 aa, Severe acute respiratory syndrome coronavirus 2
  REGION 1..16: note = Table B: HLA-DRB1*11:02L HLA-DRB4*01:01L HLA-DQA1*05:05-B1*03:116L
IIWVATEGALNTPKDH

SEQ ID NO: 22039 - protein, 16 aa, Severe acute respiratory syndrome coronavirus 2
  REGION 1..16: note = Table B: HLA-DRB1*11:02L
WPQIAQFAPSASAFFG

SEQ ID NO: 22040 - protein, 16 aa, Severe acute respiratory syndrome coronavirus 2
  REGION 1..16: note = Table B: HLA-DRB1*11:02L
ASAFFGMSRIGMEVTP

SEQ ID NO: 22041 - protein, 16 aa, Severe acute respiratory syndrome coronavirus 2
  REGION 1..16: note = Table B: HLA-DRB1*11:02L HLA-DQA1*05:05-B1*03:116L
TWLTYTGAIKLDDKDP

SEQ ID NO: 22042 - protein, 13 aa, Severe acute respiratory syndrome coronavirus 2
  REGION 1..13: note = Table B: HLA-DRB1*11:03L
EEVLSEARQHLKD

SEQ ID NO: 22043 - protein, 13 aa, Severe acute respiratory syndrome coronavirus 2
  REGION 1..13: note = Table B: HLA-DRB1*11:03L
KAAITILDGISQY

SEQ ID NO: 22044 - protein, 15 aa, Severe acute respiratory syndrome coronavirus 2
  REGION 1..15: note = Table B: HLA-DRB1*11:03L HLA-DQA1*05:05-B1*03:116L
KGLYRKCVKSREETG

SEQ ID NO: 22045 - protein, 14 aa, Severe acute respiratory syndrome coronavirus 2
  REGION 1..14: note = Table B: HLA-DRB1*11:03L HLA-DRB1*08:01L
ITFELDERIDKVLN

SEQ ID NO: 22046 - protein, 13 aa, Severe acute respiratory syndrome coronavirus 2
  REGION 1..13: note = Table B: HLA-DRB1*11:03L HLA-DRB1*11:04L HLA-DQA1*05:05-B1*03:19L HLA-DQA1*05:05-B1*03:01L HLA-DPA1*01:02-B1*04:01L HLA-DRB1*07:01L HLA-DQA1*01:03-B1*06:01L
AANVYLKHGGGVA

SEQ ID NO: 22047 - protein, 13 aa, Severe acute respiratory syndrome coronavirus 2
  REGION 1..13: note = Table B: HLA-DRB1*11:03L HLA-DRB1*14:54L HLA-DRB1*07:01L
VYLAVFDKNLYDK

SEQ ID NO: 22048 - protein, 12 aa, Severe acute respiratory syndrome coronavirus 2
  REGION 1..12: note = Table B: HLA-DRB1*11:03L HLA-DRB1*12:02L HLA-DRB1*14:17L HLA-DRB1*04:08L
NGYTVEEAKTVL

SEQ ID NO: 22049 - protein, 13 aa, Severe acute respiratory syndrome coronavirus 2
  REGION 1..13: note = Table B: HLA-DRB1*11:03L
AARYMRSLKVPAT

SEQ ID NO: 22050 - protein, 16 aa, Severe acute respiratory syndrome coronavirus 2
  REGION 1..16: note = Table B: HLA-DRB1*11:03L HLA-DRB1*08:03L
LPNDDTLRVEAFEYYH

SEQ ID NO: 22051 - protein, 15 aa, Severe acute respiratory syndrome coronavirus 2
  REGION 1..15: note = Table B: HLA-DRB1*11:03L
IDYKHYTPSFKKGAK

SEQ ID NO: 22052 - protein, 14 aa, Severe acute respiratory syndrome coronavirus 2
  REGION 1..14: note = Table B: HLA-DRB1*11:03L
YKHYTPSFKKGAKL

SEQ ID NO: 22053 - protein, 16 aa, Severe acute respiratory syndrome coronavirus 2
  REGION 1..16: note = Table B: HLA-DRB1*11:03L
VWHVNNATNKATYKPN

SEQ ID NO: 22054 - protein, 13 aa, Severe acute respiratory syndrome coronavirus 2
  REGION 1..13: note = Table B: HLA-DRB1*11:03L HLA-DRB1*11:04L HLA-DRB1*14:02L HLA-DQA1*05:05-B1*03:19L HLA-DRB1*04:10L HLA-DRB1*09:01L HLA-DPA1*01:03-B1*04:02L HLA-DRB1*08:03L
DNSSLTIKKPNEL

SEQ ID NO: 22055 - protein, 15 aa, Severe acute respiratory syndrome coronavirus 2
  REGION 1..15: note = Table B: HLA-DRB1*11:03L HLA-DRB1*09:01L HLA-DRB1*07:01L HLA-DRB1*08:03L
VPWDTIANYAKPFLN

SEQ ID NO: 22056 - protein, 15 aa, Severe acute respiratory syndrome coronavirus 2
  REGION 1..15: note = Table B: HLA-DRB1*11:03L HLA-DRB1*11:04L HLA-DRB1*11:01L HLA-DRB1*12:02L HLA-DRB1*14:54L HLA-DPA1*01:03-B1*02:01L HLA-DRB1*08:03L
DSAEVAVKMFDAYVN

SEQ ID NO: 22057 - protein, 11 aa, Severe acute respiratory syndrome coronavirus 2
  REGION 1..11: note = Table B: HLA-DRB1*11:03L HLA-DRB1*12:02L
AQVAKSHNIAL

SEQ ID NO: 22058 - protein, 13 aa, Severe acute respiratory syndrome coronavirus 2
  REGION 1..13: note = Table B: HLA-DRB1*11:03L HLA-DPA1*02:01-B1*13:01L HLA-DRB1*08:03L
ITPVHVMSKHTDF

SEQ ID NO: 22059 - protein, 14 aa, Severe acute respiratory syndrome coronavirus 2
  REGION 1..14: note = Table B: HLA-DRB1*11:03L HLA-DRB1*11:04L HLA-DRB1*04:08L
YESLRPDTRYVLMD

SEQ ID NO: 22060 - protein, 15 aa, Severe acute respiratory syndrome coronavirus 2
  REGION 1..15: note = Table B: HLA-DRB1*11:03L HLA-DRB1*14:02L
TKHFYWFFSNYLKRR

SEQ ID NO: 22061 - protein, 14 aa, Severe acute respiratory syndrome coronavirus 2
  REGION 1..14: note = Table B: HLA-DRB1*11:03L
SDVLYQPPQTSITS

SEQ ID NO: 22062 - protein, 13 aa, Severe acute respiratory syndrome coronavirus 2
  REGION 1..13: note = Table B: HLA-DRB1*11:03L HLA-DRB1*11:04L
NHNFLVQAGNVQL

SEQ ID NO: 22063 - protein, 11 aa, Severe acute respiratory syndrome coronavirus 2
  REGION 1..11: note = Table B: HLA-DRB1*11:03L HLA-DRB1*04:08L HLA-DRB1*08:02L
FLVQAGNVQLR

SEQ ID NO: 22064 - protein, 13 aa, Severe acute respiratory syndrome coronavirus 2
  REGION 1..13: note = Table B: HLA-DRB1*11:03L HLA-DRB5*01:01L HLA-DRB1*13:01L HLA-DRB1*08:03L
ILLAKDTTEAFEK

SEQ ID NO: 22065 - protein, 11 aa, Severe acute respiratory syndrome coronavirus 2
  REGION 1..11: note = Table B: HLA-DRB1*11:03L HLA-DRB1*14:02L HLA-DPA1*01:03-B1*04:01L HLA-DQA1*05:05-B1*03:116L HLA-DRB1*09:01L HLA-DPA1*01:03-B1*04:02L HLA-DRB1*12:02L HLA-DPA1*01:03-B1*104:01L HLA-DRB1*10:01L HLA-DRB1*08:03L
NIIPLTTAAKL

SEQ ID NO: 22066 - protein, 15 aa, Severe acute respiratory syndrome coronavirus 2
  REGION 1..15: note = Table B: HLA-DRB1*11:03L HLA-DRB1*15:03L
GGQPITNCVKMLCTH

SEQ ID NO: 22067 - protein, 13 aa, Severe acute respiratory syndrome coronavirus 2
  REGION 1..13: note = Table B: HLA-DRB1*11:03L HLA-DPA1*01:03-B1*04:01L HLA-DRB1*12:02L HLA-DPA1*01:03-B1*02:01L HLA-DRB1*08:03L
TNNVAFQTVKPGN

SEQ ID NO: 22068 - protein, 16 aa, Severe acute respiratory syndrome coronavirus 2
  REGION 1..16: note = Table B: HLA-DRB1*11:03L
AGFPFNKWGKARLYYD

SEQ ID NO: 22069 - protein, 13 aa, Severe acute respiratory syndrome coronavirus 2
  REGION 1..13: note = Table B: HLA-DRB1*11:03L
LKSIAATRGATVV

SEQ ID NO: 22070 - protein, 15 aa, Severe acute respiratory syndrome coronavirus 2
  REGION 1..15: note = Table B: HLA-DRB1*11:03L
ATVVIGTSKFYGGWH

SEQ ID NO: 22071 - protein, 16 aa, Severe acute respiratory syndrome coronavirus 2
  REGION 1..16: note = Table B: HLA-DRB1*11:03L HLA-DRB3*01:01L
YGGWHNMLKTVYSDVE

SEQ ID NO: 22072 - protein, 13 aa, Severe acute respiratory syndrome coronavirus 2
  REGION 1..13: note = Table B: HLA-DRB1*11:03L HLA-DRB1*14:02L HLA-DPA1*01:03-B1*04:01L HLA-DPA1*01:03-B1*04:02L HLA-DRB1*14:54L HLA-DPA1*01:03-B1*02:01L HLA-DRB1*08:02L
VNEFYAYLRKHFS

SEQ ID NO: 22073 - protein, 14 aa, Severe acute respiratory syndrome coronavirus 2
  REGION 1..14: note = Table B: HLA-DRB1*11:03L HLA-DRB1*07:01L
DYVYLPYPDPSRIL

SEQ ID NO: 22074 - protein, 13 aa, Severe acute respiratory syndrome coronavirus 2
  REGION 1..13: note = Table B: HLA-DRB1*11:03L HLA-DRB1*11:01L HLA-DRB1*13:01L
VREVLSDRELHLS

SEQ ID NO: 22075 - protein, 13 aa, Severe acute respiratory syndrome coronavirus 2
  REGION 1..13: note = Table B: HLA-DRB1*11:03L
DAVVYRGTTTYKL

SEQ ID NO: 22076 - protein, 16 aa, Severe acute respiratory syndrome coronavirus 2
  REGION 1..16: note = Table B: HLA-DRB1*11:03L HLA-DPA1*03:01-B1*105:01L
VREFLTRNPAWRKAVF

SEQ ID NO: 22077 - protein, 15 aa, Severe acute respiratory syndrome coronavirus 2
  REGION 1..15: note = Table B: HLA-DRB1*11:03L
DGGSLYVNKHAFHTP

SEQ ID NO: 22078 - protein, 14 aa, Severe acute respiratory syndrome coronavirus 2
  REGION 1..14: note = Table B: HLA-DRB1*11:03L HLA-DRB1*14:02L HLA-DRB3*01:01L HLA-DPA1*02:01-B1*13:01L HLA-DPA1*01:03-B1*104:01L
YNLWNTFTRLQSLE

SEQ ID NO: 22079 - protein, 15 aa, Severe acute respiratory syndrome coronavirus 2
  REGION 1..15: note = Table B: HLA-DRB1*11:03L HLA-DPA1*01:03-B1*04:02L
VKTQFNYYKKVDGVV

SEQ ID NO: 22080 - protein, 12 aa, Severe acute respiratory syndrome coronavirus 2
  REGION 1..12: note = Table B: HLA-DRB1*11:03L HLA-DRB1*11:04L HLA-DRB1*11:01L HLA-DRB1*09:01L HLA-DRB1*12:02L HLA-DRB3*01:01L HLA-DPA1*01:03-B1*02:01L HLA-DPA1*01:03-B1*104:01L HLA-DRB1*07:01L HLA-DRB1*10:01L HLA-DRB1*08:02L
DDFVEIIKSQDL

SEQ ID NO: 22081 - protein, 12 aa, Severe acute respiratory syndrome coronavirus 2
  REGION 1..12: note = Table B: HLA-DRB1*11:03L HLA-DRB1*11:04L HLA-DQA1*01:01-B1*05:01L HLA-DRB1*11:01L HLA-DRB1*09:01L HLA-DRB1*12:02L HLA-DRB3*01:01L HLA-DPA1*01:03-B1*02:01L HLA-DPA1*01:03-B1*104:01L HLA-DRB1*07:01L HLA-DRB1*10:01L
  REGION 1..12: note = CONT. FROM ABOVE: HLA-DRB1*08:02L
DFVEIIKSQDLS

SEQ ID NO: 22082 - protein, 16 aa, Severe acute respiratory syndrome coronavirus 2
  REGION 1..16: note = Table B: HLA-DRB1*11:03L
ISDMYDPKTKNVTKEN

SEQ ID NO: 22083 - protein, 15 aa, Severe acute respiratory syndrome coronavirus 2
  REGION 1..15: note = Table B: HLA-DRB1*11:03L
SEAFLIGCNYLGKPR

SEQ ID NO: 22084 - protein, 15 aa, Severe acute respiratory syndrome coronavirus 2
  REGION 1..15: note = Table B: HLA-DRB1*11:03L HLA-DRB1*13:01L
DMILSLLSKGRLIIR

SEQ ID NO: 22085 - protein, 16 aa, Severe acute respiratory syndrome coronavirus 2
  REGION 1..16: note = Table B: HLA-DRB1*11:03L HLA-DRB1*08:02L HLA-DRB1*08:03L
NKSWMESEFRVYSSAN

SEQ ID NO: 22086 - protein, 14 aa, Severe acute respiratory syndrome coronavirus 2
  REGION 1..14: note = Table B: HLA-DRB1*11:03L HLA-DRB1*14:54L
IDGYFKIYSKHTPI

SEQ ID NO: 22087 - protein, 14 aa, Severe acute respiratory syndrome coronavirus 2
  REGION 1..14: note = Table B: HLA-DRB1*11:03L HLA-DQA1*05:05-B1*03:01L HLA-DRB1*10:01L HLA-DRB1*08:03L HLA-DRB1*15:01L
INITRFQTLLALHR

SEQ ID NO: 22088 - protein, 11 aa, Severe acute respiratory syndrome coronavirus 2
  REGION 1..11: note = Table B: HLA-DRB1*11:03L
YGFQPTNGVGY

SEQ ID NO: 22089 - protein, 13 aa, Severe acute respiratory syndrome coronavirus 2
  REGION 1..13: note = Table B: HLA-DRB1*11:03L HLA-DQA1*01:01-B1*05:01L HLA-DRB1*08:01L HLA-DRB1*08:03L
IAVEQDKNTQEVF

SEQ ID NO: 22090 - protein, 14 aa, Severe acute respiratory syndrome coronavirus 2
  REGION 1..14: note = Table B: HLA-DRB1*11:03L
FAQVKQIYKTPPIK

SEQ ID NO: 22091 - protein, 15 aa, Severe acute respiratory syndrome coronavirus 2
  REGION 1..15: note = Table B: HLA-DRB1*11:03L HLA-DRB1*04:08L
FNGIGVTQNVLYENQ

SEQ ID NO: 22092 - protein, 13 aa, Severe acute respiratory syndrome coronavirus 2
  REGION 1..13: note = Table B: HLA-DRB1*11:03L HLA-DRB1*11:04L HLA-DRB1*04:10L HLA-DRB1*07:01L
ENQKLIANQFNSA

SEQ ID NO: 22093 - protein, 13 aa, Severe acute respiratory syndrome coronavirus 2
  REGION 1..13: note = Table B: HLA-DRB1*11:03L HLA-DRB1*11:04L HLA-DRB1*14:02L HLA-DQA1*01:01-B1*05:01L HLA-DPA1*01:03-B1*04:01L HLA-DPA1*01:03-B1*04:02L HLA-DRB1*07:01L HLA-DRB1*10:01L HLA-DRB1*08:03L
IANQFNSAIGKIQ

SEQ ID NO: 22094 - protein, 13 aa, Severe acute respiratory syndrome coronavirus 2
  REGION 1..13: note = Table B: HLA-DRB1*11:03L HLA-DRB1*12:02L
NSAIGKIQDSLSS

SEQ ID NO: 22095 - protein, 11 aa, Severe acute respiratory syndrome coronavirus 2
  REGION 1..11: note = Table B: HLA-DRB1*11:03L HLA-DRB5*01:01L HLA-DQA1*01-B1*05L HLA-DPA1*01:03-B1*04:02L HLA-DRB1*12:02L HLA-DPA1*02:01-B1*13:01L HLA-DRB1*08:02L HLA-DRB1*15:03L
SVVNIQKEIDR

SEQ ID NO: 22096 - protein, 13 aa, Severe acute respiratory syndrome coronavirus 2
  REGION 1..13: note = Table B: HLA-DRB1*11:03L HLA-DPA1*02:01-B1*13:01L HLA-DRB1*08:03L
SASKIITLKKRWQ

SEQ ID NO: 22097 - protein, 13 aa, Severe acute respiratory syndrome coronavirus 2
  REGION 1..13: note = Table B: HLA-DRB1*11:03L
ASKIITLKKRWQL

SEQ ID NO: 22098 - protein, 11 aa, Severe acute respiratory syndrome coronavirus 2
  REGION 1..11: note = Table B: HLA-DRB1*11:03L
WQLALSKGVHF

SEQ ID NO: 22099 - protein, 14 aa, Severe acute respiratory syndrome coronavirus 2
  REGION 1..14: note = Table B: HLA-DRB1*11:03L
VKPSFYVYSRVKNL

SEQ ID NO: 22100 - protein, 13 aa, Severe acute respiratory syndrome coronavirus 2
  REGION 1..13: note = Table B: HLA-DRB1*11:03L
RGHLRIAGHHLGR

SEQ ID NO: 22101 - protein, 13 aa, Severe acute respiratory syndrome coronavirus 2
  REGION 1..13: note = Table B: HLA-DRB1*11:03L
SGFAAYSRYRIGN

SEQ ID NO: 22102 - protein, 12 aa, Severe acute respiratory syndrome coronavirus 2
  REGION 1..12: note = Table B: HLA-DRB1*11:03L HLA-DRB3*01:01L HLA-DPA1*01:03-B1*02:01L
YIINLIIKNLSK

SEQ ID NO: 22103 - protein, 18 aa, Severe acute respiratory syndrome coronavirus 2
  REGION 1..18: note = Table B: HLA-DRB1*11:03L HLA-DRB1*13:01L HLA-DRB1*09:01L HLA-DRB1*15:01L
SPKLFIRQEEVQELYSPI

SEQ ID NO: 22104 - protein, 13 aa, Severe acute respiratory syndrome coronavirus 2
  REGION 1..13: note = Table B: HLA-DRB1*11:04L HLA-DRB1*14:54L HLA-DRB1*08:03L
HSYGADLKSFDLG

SEQ ID NO: 22105 - protein, 13 aa, Severe acute respiratory syndrome coronavirus 2
  REGION 1..13: note = Table B: HLA-DRB1*11:04L HLA-DRB1*11:01L HLA-DRB1*04:10L HLA-DRB1*12:01L HLA-DQA1*03:01-B1*03:02L HLA-DRB1*14:17L HLA-DQA1*02:01-B1*03:03L HLA-DRB1*15:03L
GYPLECIKDLLAR

SEQ ID NO: 22106 - protein, 14 aa, Severe acute respiratory syndrome coronavirus 2
  REGION 1..14: note = Table B: HLA-DRB1*11:04L HLA-DRB1*11:01L
FEIKLAKKFDTFNG

SEQ ID NO: 22107 - protein, 15 aa, Severe acute respiratory syndrome coronavirus 2
  REGION 1..15: note = Table B: HLA-DRB1*11:04L HLA-DRB1*11:01L HLA-DRB3*01:01L
KTILRKGGRTIAFGG

SEQ ID NO: 22108 - protein, 15 aa, Severe acute respiratory syndrome coronavirus 2
  REGION 1..15: note = Table B: HLA-DRB1*11:04L
AARVVRSIFSRTLET

SEQ ID NO: 22109 - protein, 14 aa, Severe acute respiratory syndrome coronavirus 2
  REGION 1..14: note = Table B: HLA-DRB1*11:04L
SVNITFELDERIDK

SEQ ID NO: 22110 - protein, 13 aa, Severe acute respiratory syndrome coronavirus 2
  REGION 1..13: note = Table B: HLA-DRB1*11:04L
IQTIVEVQPQLEM

SEQ ID NO: 22111 - protein, 13 aa, Severe acute respiratory syndrome coronavirus 2
  REGION 1..13: note = Table B: HLA-DRB1*11:04L HLA-DRB1*04:10L HLA-DRB3*01:01L HLA-DRB1*04:08L
KPTVVVNAANVYL

SEQ ID NO: 22112 - protein, 14 aa, Severe acute respiratory syndrome coronavirus 2
  REGION 1..14: note = Table B: HLA-DRB1*11:04L
PYIVGDVVQEGVLT

SEQ ID NO: 22113 - protein, 13 aa, Severe acute respiratory syndrome coronavirus 2
  REGION 1..13: note = Table B: HLA-DRB1*11:04L HLA-DRB1*11:01L
QLGIEFLKRGDKS

SEQ ID NO: 22114 - protein, 14 aa, Severe acute respiratory syndrome coronavirus 2
  REGION 1..14: note = Table B: HLA-DRB1*11:04L HLA-DRB1*14:02L HLA-DRB1*09:01L HLA-DPA1*01:03-B1*04:02L HLA-DRB1*08:02L
VDNINLHTQVVDMS

SEQ ID NO: 22115 - protein, 14 aa, Severe acute respiratory syndrome coronavirus 2
  REGION 1..14: note = Table B: HLA-DRB1*11:04L HLA-DRB1*11:01L HLA-DRB3*01:01L
DGADVTKIKPHNSH

SEQ ID NO: 22116 - protein, 14 aa, Severe acute respiratory syndrome coronavirus 2
  REGION 1..14: note = Table B: HLA-DRB1*11:04L
GADVTKIKPHNSHE

SEQ ID NO: 22117 - protein, 14 aa, Severe acute respiratory syndrome coronavirus 2
  REGION 1..14: note = Table B: HLA-DRB1*11:04L HLA-DPA1*03:01-B1*105:01L HLA-DQA1*05:05-B1*03:01L
ADVTKIKPHNSHEG

SEQ ID NO: 22118 - protein, 16 aa, Severe acute respiratory syndrome coronavirus 2
  REGION 1..16: note = Table B: HLA-DRB1*11:04L HLA-DRB1*14:02L
TLRVEAFEYYHTTDPS

SEQ ID NO: 22119 - protein, 15 aa, Severe acute respiratory syndrome coronavirus 2
  REGION 1..15: note = Table B: HLA-DRB1*11:04L HLA-DRB1*11:01L
KRVLNVVCKTCGQQQ

SEQ ID NO: 22120 - protein, 19 aa, Severe acute respiratory syndrome coronavirus 2
  REGION 1..19: note = Table B: HLA-DRB1*11:04L HLA-DRB4*01:01L HLA-DQA1*05:05-B1*03:116L HLA-DRB1*15:01L
GPITDVFYKENSYTTTIKP

SEQ ID NO: 22121 - protein, 14 aa, Severe acute respiratory syndrome coronavirus 2
  REGION 1..14: note = Table B: HLA-DRB1*11:04L HLA-DRB1*14:02L HLA-DRB1*11:01L HLA-DQA1*05:01-B1*02:01L HLA-DRB1*08:03L
LDNYYKKDNSYFTE

SEQ ID NO: 22122 - protein, 13 aa, Severe acute respiratory syndrome coronavirus 2
  REGION 1..13: note = Table B: HLA-DRB1*11:04L HLA-DRB1*11:01L HLA-DPA1*01:03-B1*04:02L HLA-DRB3*01:01L HLA-DPA1*01:03-B1*02:01L
VAIDYKHYTPSFK

SEQ ID NO: 22123 - protein, 14 aa, Severe acute respiratory syndrome coronavirus 2
  REGION 1..14: note = Table B: HLA-DRB1*11:04L HLA-DRB1*11:01L HLA-DPA1*02:01-B1*13:01L
AIDYKHYTPSFKKG

SEQ ID NO: 22124 - protein, 14 aa, Severe acute respiratory syndrome coronavirus 2
  REGION 1..14: note = Table B: HLA-DRB1*11:04L HLA-DQA1*01:01-B1*05:01L HLA-DRB1*08:01L HLA-DRB1*08:03L
THGLAAVNSVPWDT

SEQ ID NO: 22125 - protein, 14 aa, Severe acute respiratory syndrome coronavirus 2
  REGION 1..14: note = Table B: HLA-DRB1*11:04L HLA-DRB1*08:01L HLA-DRB3*01:01L HLA-DRB1*16:01L
VARDLSLQFKRPIN

SEQ ID NO: 22126 - protein, 15 aa, Severe acute respiratory syndrome coronavirus 2
  REGION 1..15: note = Table B: HLA-DRB1*11:04L HLA-DPA1*03:01-B1*105:01L HLA-DRB1*07:01L
GQKTYERHSLSHFVN

SEQ ID NO: 22127 - protein, 13 aa, Severe acute respiratory syndrome coronavirus 2
  REGION 1..13: note = Table B: HLA-DRB1*11:04L HLA-DRB1*04:08L
LSTFISAARQGFV

SEQ ID NO: 22128 - protein, 13 aa, Severe acute respiratory syndrome coronavirus 2
  REGION 1..13: note = Table B: HLA-DRB1*11:04L
INAQVAKSHNIAL

SEQ ID NO: 22129 - protein, 14 aa, Severe acute respiratory syndrome coronavirus 2
  REGION 1..14: note = Table B: HLA-DRB1*11:04L HLA-DRB1*11:01L
NVKDFMSLSEQLRK

SEQ ID NO: 22130 - protein, 13 aa, Severe acute respiratory syndrome coronavirus 2
  REGION 1..13: note = Table B: HLA-DRB1*11:04L HLA-DQA1*03:01-B1*03:02L
LRKQIRSAAKKNN

SEQ ID NO: 22131 - protein, 14 aa, Severe acute respiratory syndrome coronavirus 2
  REGION 1..14: note = Table B: HLA-DRB1*11:04L HLA-DRB1*11:01L HLA-DRB3*01:01L
QIRSAAKKNNLPFK

SEQ ID NO: 22132 - protein, 14 aa, Severe acute respiratory syndrome coronavirus 2
  REGION 1..14: note = Table B: HLA-DRB1*11:04L
RQVVNVVTTKIALK

SEQ ID NO: 22133 - protein, 15 aa, Severe acute respiratory syndrome coronavirus 2
  REGION 1..15: note = Table B: HLA-DRB1*11:04L
HADFDTWFSQRGGSY

SEQ ID NO: 22134 - protein, 12 aa, Severe acute respiratory syndrome coronavirus 2
  REGION 1..12: note = Table B: HLA-DRB1*11:04L HLA-DRB1*08:01L HLA-DRB1*12:02L HLA-DQA1*05:05-B1*03:01L HLA-DRB1*07:01L HLA-DRB1*08:03L
SIIQFPNTYLEG

SEQ ID NO: 22135 - protein, 15 aa, Severe acute respiratory syndrome coronavirus 2
  REGION 1..15: note = Table B: HLA-DRB1*11:04L HLA-DRB1*11:01L HLA-DRB1*10:01L
FPNTYLEGSVRVVTT

SEQ ID NO: 22136 - protein, 13 aa, Severe acute respiratory syndrome coronavirus 2
  REGION 1..13: note = Table B: HLA-DRB1*11:04L HLA-DQA1*05:05-B1*03:19L HLA-DRB1*10:01L HLA-DRB1*08:03L
EGSVRVVTTFDSE

SEQ ID NO: 22137 - protein, 13 aa, Severe acute respiratory syndrome coronavirus 2
  REGION 1..13: note = Table B: HLA-DRB1*11:04L HLA-DRB1*12:01L HLA-DRB3*01:01L
LAYYFMRFRRAFG

SEQ ID NO: 22138 - protein, 14 aa, Severe acute respiratory syndrome coronavirus 2
  REGION 1..14: note = Table B: HLA-DRB1*11:04L
LNGLWLDDVVYCPR

SEQ ID NO: 22139 - protein, 14 aa, Severe acute respiratory syndrome coronavirus 2
  REGION 1..14: note = Table B: HLA-DRB1*11:04L HLA-DRB1*11:01L
NPNYEDLLIRKSNH

SEQ ID NO: 22140 - protein, 14 aa, Severe acute respiratory syndrome coronavirus 2
  REGION 1..14: note = Table B: HLA-DRB1*11:04L HLA-DRB1*08:01L HLA-DRB1*15:01L
QEFRYMNSQGLLPP

SEQ ID NO: 22141 - protein, 14 aa, Severe acute respiratory syndrome coronavirus 2
  REGION 1..14: note = Table B: HLA-DRB1*11:04L
EFRYMNSQGLLPPK

SEQ ID NO: 22142 - protein, 14 aa, Severe acute respiratory syndrome coronavirus 2
  REGION 1..14: note = Table B: HLA-DRB1*11:04L HLA-DRB1*08:02L
TEAFEKMVSLLSVL

SEQ ID NO: 22143 - protein, 13 aa, Severe acute respiratory syndrome coronavirus 2
  REGION 1..13: note = Table B: HLA-DRB1*11:04L
MLFTMLRKLDNDA

SEQ ID NO: 22144 - protein, 14 aa, Severe acute respiratory syndrome coronavirus 2
  REGION 1..14: note = Table B: HLA-DRB1*11:04L
LNNIINNARDGCVP

SEQ ID NO: 22145 - protein, 13 aa, Severe acute respiratory syndrome coronavirus 2
  REGION 1..13: note = Table B: HLA-DRB1*11:04L HLA-DRB1*11:01L
KGLNNLNRGMVLG

SEQ ID NO: 22146 - protein, 16 aa, Severe acute respiratory syndrome coronavirus 2
  REGION 1..16: note = Table B: HLA-DRB1*11:04L
KRHTFSNYQHEETIYN

SEQ ID NO: 22147 - protein, 15 aa, Severe acute respiratory syndrome coronavirus 2
  REGION 1..15: note = Table B: HLA-DRB1*11:04L HLA-DRB3*01:01L
FSNYQHEETIYNLLK

SEQ ID NO: 22148 - protein, 14 aa, Severe acute respiratory syndrome coronavirus 2
  REGION 1..14: note = Table B: HLA-DRB1*11:04L HLA-DRB1*08:01L HLA-DRB1*11:01L HLA-DPA1*03:01-B1*105:01L HLA-DQA1*05:05-B1*03:01L
PILTLTRALTAESH

SEQ ID NO: 22149 - protein, 13 aa, Severe acute respiratory syndrome coronavirus 2
  REGION 1..13: note = Table B: HLA-DRB1*11:04L
QMNLKYAISAKNR

SEQ ID NO: 22150 - protein, 14 aa, Severe acute respiratory syndrome coronavirus 2
  REGION 1..14: note = Table B: HLA-DRB1*11:04L HLA-DRB1*04:08L
GATVVIGTSKFYGG

SEQ ID NO: 22151 - protein, 13 aa, Severe acute respiratory syndrome coronavirus 2
  REGION 1..13: note = Table B: HLA-DRB1*11:04L HLA-DRB1*11:01L HLA-DRB1*16:01L
GGWHNMLKTVYSD

SEQ ID NO: 22152 - protein, 15 aa, Severe acute respiratory syndrome coronavirus 2
  REGION 1..15: note = Table B: HLA-DRB1*11:04L HLA-DRB1*11:01L
DGNKIADKYVRNLQH

SEQ ID NO: 22153 - protein, 15 aa, Severe acute respiratory syndrome coronavirus 2
  REGION 1..15: note = Table B: HLA-DRB1*11:04L HLA-DRB1*11:01L
GNKIADKYVRNLQHR

SEQ ID NO: 22154 - protein, 12 aa, Severe acute respiratory syndrome coronavirus 2
  REGION 1..12: note = Table B: HLA-DRB1*11:04L HLA-DRB1*14:54L
ADKYVRNLQHRL

SEQ ID NO: 22155 - protein, 13 aa, Severe acute respiratory syndrome coronavirus 2
  REGION 1..13: note = Table B: HLA-DRB1*11:04L HLA-DQA1*01-B1*05L
QGLVASIKNFKSV

SEQ ID NO: 22156 - protein, 13 aa, Severe acute respiratory syndrome coronavirus 2
  REGION 1..13: note = Table B: HLA-DRB1*11:04L HLA-DRB1*09:01L
VANYQKVGMQKYS

SEQ ID NO: 22157 - protein, 14 aa, Severe acute respiratory syndrome coronavirus 2
  REGION 1..14: note = Table B: HLA-DRB1*11:04L
EPEYFNSVCRLMKT

SEQ ID NO: 22158 - protein, 13 aa, Severe acute respiratory syndrome coronavirus 2
  REGION 1..13: note = Table B: HLA-DRB1*11:04L HLA-DRB1*11:01L HLA-DRB1*13:01L
REFLTRNPAWRKA

SEQ ID NO: 22159 - protein, 14 aa, Severe acute respiratory syndrome coronavirus 2
  REGION 1..14: note = Table B: HLA-DRB1*11:04L HLA-DRB1*11:01L HLA-DRB3*01:01L HLA-DRB1*15:03L
LTSMKYFVKIGPER

SEQ ID NO: 22160 - protein, 12 aa, Severe acute respiratory syndrome coronavirus 2
  REGION 1..12: note = Table B: HLA-DRB1*11:04L HLA-DRB1*11:01L
DYVYNPFMIDVQ

SEQ ID NO: 22161 - protein, 15 aa, Severe acute respiratory syndrome coronavirus 2
  REGION 1..15: note = Table B: HLA-DRB1*11:04L
SDKAYKIEELFYSYA

SEQ ID NO: 22162 - protein, 12 aa, Severe acute respiratory syndrome coronavirus 2
  REGION 1..12: note = Table B: HLA-DRB1*11:04L HLA-DRB1*11:01L HLA-DRB3*01:01L HLA-DPA1*01:03-B1*02:01L
PAFDKSAFVNLK

SEQ ID NO: 22163 - protein, 14 aa, Severe acute respiratory syndrome coronavirus 2
  REGION 1..14: note = Table B: HLA-DRB1*11:04L HLA-DRB1*11:01L
LGGAVCRHHANEYR

SEQ ID NO: 22164 - protein, 15 aa, Severe acute respiratory syndrome coronavirus 2
  REGION 1..15: note = Table B: HLA-DRB1*11:04L HLA-DRB1*11:01L
KRNIKPVPEVKILNN

SEQ ID NO: 22165 - protein, 13 aa, Severe acute respiratory syndrome coronavirus 2
  REGION 1..13: note = Table B: HLA-DRB1*11:04L HLA-DRB1*08:03L HLA-DRB1*15:01L
DGQVDLFRNARNG

SEQ ID NO: 22166 - protein, 13 aa, Severe acute respiratory syndrome coronavirus 2
  REGION 1..13: note = Table B: HLA-DRB1*11:04L HLA-DRB1*11:01L
PETYFTQSRNLQE

SEQ ID NO: 22167 - protein, 15 aa, Severe acute respiratory syndrome coronavirus 2
  REGION 1..15: note = Table B: HLA-DRB1*11:04L HLA-DRB1*08:03L
IGCNYLGKPREQIDG

SEQ ID NO: 22168 - protein, 11 aa, Severe acute respiratory syndrome coronavirus 2
  REGION 1..11: note = Table B: HLA-DRB1*11:04L HLA-DRB1*11:01L HLA-DQA1*05:05-B1*03:116L HLA-DPA1*01:03-B1*04:02L HLA-DRB1*10:01L HLA-DRB1*08:03L
IFWRNTNPIQL

SEQ ID NO: 22169 - protein, 13 aa, Severe acute respiratory syndrome coronavirus 2
  REGION 1..13: note = Table B: HLA-DRB1*11:04L HLA-DRB3*01:01L HLA-DPA1*02:01-B1*13:01L
KVFRSSVLHSTQD

SEQ ID NO: 22170 - protein, 13 aa, Severe acute respiratory syndrome coronavirus 2
  REGION 1..13: note = Table B: HLA-DRB1*11:04L HLA-DRB3*01:01L
LGVYYHKNNKSWM

SEQ ID NO: 22171 - protein, 15 aa, Severe acute respiratory syndrome coronavirus 2
  REGION 1..15: note = Table B: HLA-DRB1*11:04L HLA-DRB1*11:01L
GKQGNFKNLREFVFK

SEQ ID NO: 22172 - protein, 13 aa, Severe acute respiratory syndrome coronavirus 2
  REGION 1..13: note = Table B: HLA-DRB1*11:04L
REFVFKNIDGYFK

SEQ ID NO: 22173 - protein, 13 aa, Severe acute respiratory syndrome coronavirus 2
  REGION 1..13: note = Table B: HLA-DRB1*11:04L HLA-DPA1*01:03-B1*02:01L
AAAYYVGYLQPRT

SEQ ID NO: 22174 - protein, 13 aa, Severe acute respiratory syndrome coronavirus 2
  REGION 1..13: note = Table B: HLA-DRB1*11:04L HLA-DRB1*15:01L
AAYYVGYLQPRTF

SEQ ID NO: 22175 - protein, 14 aa, Severe acute respiratory syndrome coronavirus 2
  REGION 1..14: note = Table B: HLA-DRB1*11:04L HLA-DRB3*01:01L HLA-DRB1*07:01L
KSFTVEKGIYQTSN

SEQ ID NO: 22176 - protein, 15 aa, Severe acute respiratory syndrome coronavirus 2
  REGION 1..15: note = Table B: HLA-DRB1*11:04L HLA-DRB1*12:02L
VQPTESIVRFPNITN

SEQ ID NO: 22177 - protein, 15 aa, Severe acute respiratory syndrome coronavirus 2
  REGION 1..15: note = Table B: HLA-DRB1*11:04L
QPTESIVRFPNITNL

SEQ ID NO: 22178 - protein, 16 aa, Severe acute respiratory syndrome coronavirus 2
  REGION 1..16: note = Table B: HLA-DRB1*11:04L
SYGFQPTNGVGYQPYR

SEQ ID NO: 22179 - protein, 13 aa, Severe acute respiratory syndrome coronavirus 2
  REGION 1..13: note = Table B: HLA-DRB1*11:04L HLA-DRB1*11:01L
ADQLTPTWRVYST

SEQ ID NO: 22180 - protein, 14 aa, Severe acute respiratory syndrome coronavirus 2
  REGION 1..14: note = Table B: HLA-DRB1*11:04L HLA-DRB1*08:01L HLA-DPA1*01:03-B1*104:01L HLA-DRB1*10:01L
TEILPVSMTKTSVD

SEQ ID NO: 22181 - protein, 14 aa, Severe acute respiratory syndrome coronavirus 2
  REGION 1..14: note = Table B: HLA-DRB1*11:04L HLA-DRB1*07:01L HLA-DRB1*15:01L
VVIGIVNNTVYDPL

SEQ ID NO: 22182 - protein, 15 aa, Severe acute respiratory syndrome coronavirus 2
  REGION 1..15: note = Table B: HLA-DRB1*11:04L HLA-DRB1*09:01L HLA-DRB3*01:01L HLA-DRB1*10:01L
IGIVNNTVYDPLQPE

SEQ ID NO: 22183 - protein, 12 aa, Severe acute respiratory syndrome coronavirus 2
  REGION 1..12: note = Table B: HLA-DRB1*11:04L HLA-DRB1*11:01L HLA-DPA1*01:03-B1*02:01L
VFQSASKIITLK

SEQ ID NO: 22184 - protein, 15 aa, Severe acute respiratory syndrome coronavirus 2
  REGION 1..15: note = Table B: HLA-DRB1*11:04L HLA-DRB1*11:01L HLA-DRB3*01:01L
VYFLQSINFVRIIMR

SEQ ID NO: 22185 - protein, 14 aa, Severe acute respiratory syndrome coronavirus 2
  REGION 1..14: note = Table B: HLA-DRB1*11:04L HLA-DRB1*14:02L HLA-DRB1*15:03L
TSGDGTTSPISEHD

SEQ ID NO: 22186 - protein, 13 aa, Severe acute respiratory syndrome coronavirus 2
  REGION 1..13: note = Table B: HLA-DRB1*11:04L HLA-DRB1*11:01L HLA-DRB3*01:01L HLA-DPA1*01:03-B1*02:01L
HSYFTSDYYQLYS

SEQ ID NO: 22187 - protein, 14 aa, Severe acute respiratory syndrome coronavirus 2
  REGION 1..14: note = Table B: HLA-DRB1*11:04L HLA-DRB1*08:01L HLA-DRB1*11:01L
RCDIKDLPKEITVA

SEQ ID NO: 22188 - protein, 14 aa, Severe acute respiratory syndrome coronavirus 2
  REGION 1..14: note = Table B: HLA-DRB1*11:04L
GFAAYSRYRIGNYK

SEQ ID NO: 22189 - protein, 14 aa, Severe acute respiratory syndrome coronavirus 2
  REGION 1..14: note = Table B: HLA-DRB1*11:04L HLA-DPA1*01:03-B1*04:02L
LYHYQECVRGTTVL

SEQ ID NO: 22190 - protein, 17 aa, Severe acute respiratory syndrome coronavirus 2
  REGION 1..17: note = Table B: HLA-DRB1*11:04L
AEGSRGGSQASSRSSSR

SEQ ID NO: 22191 - protein, 16 aa, Severe acute respiratory syndrome coronavirus 2
  REGION 1..16: note = Table B: HLA-DRB1*11:04L HLA-DRB1*11:01L
GSRGGSQASSRSSSRS

SEQ ID NO: 22192 - protein, 15 aa, Severe acute respiratory syndrome coronavirus 2
  REGION 1..15: note = Table B: HLA-DRB1*11:04L HLA-DRB1*11:01L
KAYNVTQAFGRRGPE

SEQ ID NO: 22193 - protein, 17 aa, Severe acute respiratory syndrome coronavirus 2
  REGION 1..17: note = Table B: HLA-DRB1*11:04L
TPSGTWLTYTGAIKLDD

SEQ ID NO: 22194 - protein, 14 aa, Severe acute respiratory syndrome coronavirus 2
  REGION 1..14: note = Table B: HLA-DRB1*11:04L
AADLDDFSKQLQQS

SEQ ID NO: 22195 - protein, 15 aa, Severe acute respiratory syndrome coronavirus 2
  REGION 1..15: note = Table B: HLA-DRB1*14:02L HLA-DRB4*01:01L HLA-DRB1*09:01L
DVLVRGFGDSVEEVL

SEQ ID NO: 22196 - protein, 11 aa, Severe acute respiratory syndrome coronavirus 2
  REGION 1..11: note = Table B: HLA-DRB1*14:02L HLA-DPA1*01:03-B1*04:02L HLA-DPA1*01:03-B1*104:01L
VEVEKGVLPQL

SEQ ID NO: 22197 - protein, 13 aa, Severe acute respiratory syndrome coronavirus 2
  REGION 1..13: note = Table B: HLA-DRB1*14:02L HLA-DQA1*05:05-B1*03:116L HLA-DPA1*01:03-B1*04:02L HLA-DRB1*08:02L HLA-DRB1*15:03L
EQPYVFIKRSDAR

SEQ ID NO: 22198 - protein, 16 aa, Severe acute respiratory syndrome coronavirus 2
  REGION 1..16: note = Table B: HLA-DRB1*14:02L
EDFQENWNTKHSSGVT

SEQ ID NO: 22199 - protein, 18 aa, Severe acute respiratory syndrome coronavirus 2
  REGION 1..18: note = Table B: HLA-DRB1*14:02L HLA-DPA1*01:03-B1*04:02L
IKDLLARAGKASCTLSEQ

SEQ ID NO: 22200 - protein, 13 aa, Severe acute respiratory syndrome coronavirus 2
  REGION 1..13: note = Table B: HLA-DRB1*14:02L HLA-DQA1*05:05-B1*03:01L
LAEYHNESGLKTI

SEQ ID NO: 22201 - protein, 14 aa, Severe acute respiratory syndrome coronavirus 2
  REGION 1..14: note = Table B: HLA-DRB1*14:02L HLA-DPA1*02:01-B1*13:01L HLA-DPA1*01:03-B1*104:01L
SFSASTSAFVETVK

SEQ ID NO: 22202 - protein, 16 aa, Severe acute respiratory syndrome coronavirus 2
  REGION 1..16: note = Table B: HLA-DRB1*14:02L HLA-DPA1*02:01-B1*13:01L
GNFKVTKGKAKKGAWN

SEQ ID NO: 22203 - protein, 16 aa, Severe acute respiratory syndrome coronavirus 2
  REGION 1..16: note = Table B: HLA-DRB1*14:02L
GGVVQLTSQWLTNIFG

SEQ ID NO: 22204 - protein, 14 aa, Severe acute respiratory syndrome coronavirus 2
  REGION 1..14: note = Table B: HLA-DRB1*14:02L HLA-DRB1*08:02L
GGQIVTCAKEIKES

SEQ ID NO: 22205 - protein, 18 aa, Severe acute respiratory syndrome coronavirus 2
  REGION 1..18: note = Table B: HLA-DRB1*14:02L HLA-DPA1*01:03-B1*04:02L
VNKFLALCADSIIIGGAK

SEQ ID NO: 22206 - protein, 14 aa, Severe acute respiratory syndrome coronavirus 2
  REGION 1..14: note = Table B: HLA-DRB1*14:02L HLA-DPA1*02:01-B1*13:01L
IIIGGAKLKALNLG

SEQ ID NO: 22207 - protein, 16 aa, Severe acute respiratory syndrome coronavirus 2
  REGION 1..16: note = Table B: HLA-DRB1*14:02L HLA-DPA1*01:03-B1*04:02L HLA-DRB1*07:01L HLA-DRB1*15:03L
SKGLYRKCVKSREETG

SEQ ID NO: 22208 - protein, 13 aa, Severe acute respiratory syndrome coronavirus 2
  REGION 1..13: note = Table B: HLA-DRB1*14:02L HLA-DQA1*01-B1*05L
KEIIFLEGETLPT

SEQ ID NO: 22209 - protein, 13 aa, Severe acute respiratory syndrome coronavirus 2
  REGION 1..13: note = Table B: HLA-DRB1*14:02L HLA-DRB1*12:02L
EIIFLEGETLPTE

SEQ ID NO: 22210 - protein, 14 aa, Severe acute respiratory syndrome coronavirus 2
  REGION 1..14: note = Table B: HLA-DRB1*14:02L HLA-DPA1*02:01-B1*13:01L
IIFLEGETLPTEVL

SEQ ID NO: 22211 - protein, 15 aa, Severe acute respiratory syndrome coronavirus 2
  REGION 1..15: note = Table B: HLA-DRB1*14:02L
TEKYCALAPNMMVTN

SEQ ID NO: 22212 - protein, 14 aa, Severe acute respiratory syndrome coronavirus 2
  REGION 1..14: note = Table B: HLA-DRB1*14:02L HLA-DPA1*02:01-B1*13:01L HLA-DRB1*07:01L HLA-DRB1*10:01L
NTFTLKGGAPTKVT

SEQ ID NO: 22213 - protein, 14 aa, Severe acute respiratory syndrome coronavirus 2
  REGION 1..14: note = Table B: HLA-DRB1*14:02L
TFGDDTVIEVQGYK

SEQ ID NO: 22214 - protein, 14 aa, Severe acute respiratory syndrome coronavirus 2
  REGION 1..14: note = Table B: HLA-DRB1*14:02L HLA-DRB1*15:03L
SEDNQTTTIQTIVE

SEQ ID NO: 22215 - protein, 13 aa, Severe acute respiratory syndrome coronavirus 2
  REGION 1..13: note = Table B: HLA-DRB1*14:02L HLA-DRB1*08:01L HLA-DPA1*01:03-B1*104:01L
DIQLLKSAYENFN

SEQ ID NO: 22216 - protein, 13 aa, Severe acute respiratory syndrome coronavirus 2
  REGION 1..13: note = Table B: HLA-DRB1*14:02L
TLEETKFLTENLL

SEQ ID NO: 22217 - protein, 15 aa, Severe acute respiratory syndrome coronavirus 2
  REGION 1..15: note = Table B: HLA-DRB1*14:02L HLA-DRB1*08:02L
QRKYKGIKIQEGVVD

SEQ ID NO: 22218 - protein, 18 aa, Severe acute respiratory syndrome coronavirus 2
  REGION 1..18: note = Table B: HLA-DRB1*14:02L
TLLSLREVRTIKVFTTVD

SEQ ID NO: 22219 - protein, 18 aa, Severe acute respiratory syndrome coronavirus 2
  REGION 1..18: note = Table B: HLA-DRB1*14:02L
DPSFLGRYMSALNHTKKW

SEQ ID NO: 22220 - protein, 16 aa, Severe acute respiratory syndrome coronavirus 2
  REGION 1..16: note = Table B: HLA-DRB1*14:02L HLA-DQA1*05:05-B1*03:19L HLA-DQA1*05:01-B1*02:01L HLA-DPA1*01:03-B1*04:02L HLA-DRB1*08:02L HLA-DRB1*08:03L
MSALNHTKKWKYPQVN

SEQ ID NO: 22221 - protein, 16 aa, Severe acute respiratory syndrome coronavirus 2
  REGION 1..16: note = Table B: HLA-DRB1*14:02L
GLTSIKWADNNCYLAT

SEQ ID NO: 22222 - protein, 16 aa, Severe acute respiratory syndrome coronavirus 2
  REGION 1..16: note = Table B: HLA-DRB1*14:02L HLA-DRB1*09:01L
LGDVRETMSYLFQHAN

SEQ ID NO: 22223 - protein, 13 aa, Severe acute respiratory syndrome coronavirus 2
  REGION 1..13: note = Table B: HLA-DRB1*14:02L HLA-DPA1*01:03-B1*04:02L HLA-DRB1*12:01L HLA-DQA1*05:05-B1*03:01L HLA-DRB1*16:01L HLA-DQA1*01:03-B1*06:01L
ASEYTGNYQCGHY

SEQ ID NO: 22224 - protein, 11 aa, Severe acute respiratory syndrome coronavirus 2
  REGION 1..11: note = Table B: HLA-DRB1*14:02L HLA-DQA1*05:01-B1*02:01L HLA-DPA1*03:01-B1*105:01L HLA-DRB1*15:03L
YPNASFDNFKF

SEQ ID NO: 22225 - protein, 13 aa, Severe acute respiratory syndrome coronavirus 2
  REGION 1..13: note = Table B: HLA-DRB1*14:02L
IKFADDLNQLTGY

SEQ ID NO: 22226 - protein, 16 aa, Severe acute respiratory syndrome coronavirus 2
  REGION 1..16: note = Table B: HLA-DRB1*14:02L
SRELKVTFFPDLNGDV

SEQ ID NO: 22227 - protein, 16 aa, Severe acute respiratory syndrome coronavirus 2
  REGION 1..16: note = Table B: HLA-DRB1*14:02L
AIDYKHYTPSFKKGAK

SEQ ID NO: 22228 - protein, 15 aa, Severe acute respiratory syndrome coronavirus 2
  REGION 1..15: note = Table B: HLA-DRB1*14:02L HLA-DQA1*05:05-B1*03:116L
DYKHYTPSFKKGAKL

SEQ ID NO: 22229 - protein, 15 aa, Severe acute respiratory syndrome coronavirus 2
  REGION 1..15: note = Table B: HLA-DRB1*14:02L HLA-DRB1*08:03L
EDLKPVSEEVVENPT

SEQ ID NO: 22230 - protein, 14 aa, Severe acute respiratory syndrome coronavirus 2
  REGION 1..14: note = Table B: HLA-DRB1*14:02L
ASFYYVWKSYVHVV

SEQ ID NO: 22231 - protein, 12 aa, Severe acute respiratory syndrome coronavirus 2
  REGION 1..12: note = Table B: HLA-DRB1*14:02L
QSSYIVDSVTVK

SEQ ID NO: 22232 - protein, 13 aa, Severe acute respiratory syndrome coronavirus 2
  REGION 1..13: note = Table B: HLA-DRB1*14:02L HLA-DRB1*15:03L
ILLLDQALVSDVG

SEQ ID NO: 22233 - protein, 17 aa, Severe acute respiratory syndrome coronavirus 2
  REGION 1..17: note = Table B: HLA-DRB1*14:02L HLA-DPA1*01:03-B1*04:02L
VPMEKLKTLVATAEAEL

SEQ ID NO: 22234 - protein, 11 aa, Severe acute respiratory syndrome coronavirus 2
  REGION 1..11: note = Table B: HLA-DRB1*14:02L HLA-DQA1*05:05-B1*03:19L HLA-DQA1*01:03-B1*06:01L
FVDSDVETKDV

SEQ ID NO: 22235 - protein, 14 aa, Severe acute respiratory syndrome coronavirus 2
  REGION 1..14: note = Table B: HLA-DRB1*14:02L
NNYMLTYNKVENMT

SEQ ID NO: 22236 - protein, 17 aa, Severe acute respiratory syndrome coronavirus 2
  REGION 1..17: note = Table B: HLA-DRB1*14:02L HLA-DQA1*05:05-B1*03:19L HLA-DQA1*05:05-B1*03:116L HLA-DPA1*01:03-B1*04:02L
LRKQIRSAAKKNNLPFK

SEQ ID NO: 22237 - protein, 16 aa, Severe acute respiratory syndrome coronavirus 2
  REGION 1..16: note = Table B: HLA-DRB1*14:02L HLA-DQA1*05:05-B1*03:19L HLA-DQA1*05:05-B1*03:01L HLA-DRB1*08:02L
GGKIVNNWLKQLIKVT

SEQ ID NO: 22238 - protein, 11 aa, Severe acute respiratory syndrome coronavirus 2
  REGION 1..11: note = Table B: HLA-DRB1*14:02L HLA-DQA1*02:01-B1*03:03L
RVFSAVGNICY

SEQ ID NO: 22239 - protein, 14 aa, Severe acute respiratory syndrome coronavirus 2
  REGION 1..14: note = Table B: HLA-DRB1*14:02L
SGRWVLNNDYYRSL

SEQ ID NO: 22240 - protein, 16 aa, Severe acute respiratory syndrome coronavirus 2
  REGION 1..16: note = Table B: HLA-DRB1*14:02L HLA-DPA1*01:03-B1*104:01L
AVNLLTNMFTPLIQPI

SEQ ID NO: 22241 - protein, 18 aa, Severe acute respiratory syndrome coronavirus 2
  REGION 1..18: note = Table B: HLA-DRB1*14:02L HLA-DPA1*01:03-B1*104:01L
QPIGALDISASIVAGGIV

SEQ ID NO: 22242 - protein, 18 aa, Severe acute respiratory syndrome coronavirus 2
  REGION 1..18: note = Table B: HLA-DRB1*14:02L
NKEMYLKLRSDVLLPLTQ

SEQ ID NO: 22243 - protein, 16 aa, Severe acute respiratory syndrome coronavirus 2
  REGION 1..16: note = Table B: HLA-DRB1*14:02L
LAKALNDFSNSGSDVL

SEQ ID NO: 22244 - protein, 18 aa, Severe acute respiratory syndrome coronavirus 2
  REGION 1..18: note = Table B: HLA-DRB1*14:02L
ALNDFSNSGSDVLYQPPQ

SEQ ID NO: 22245 - protein, 17 aa, Severe acute respiratory syndrome coronavirus 2
  REGION 1..17: note = Table B: HLA-DRB1*14:02L
VGFNIDYDCVSFCYMHH

SEQ ID NO: 22246 - protein, 16 aa, Severe acute respiratory syndrome coronavirus 2
  REGION 1..16: note = Table B: HLA-DRB1*14:02L
NIDYDCVSFCYMHHME

SEQ ID NO: 22247 - protein, 16 aa, Severe acute respiratory syndrome coronavirus 2
  REGION 1..16: note = Table B: HLA-DRB1*14:02L
NGRTILGSALLEDEFT

SEQ ID NO: 22248 - protein, 16 aa, Severe acute respiratory syndrome coronavirus 2
  REGION 1..16: note = Table B: HLA-DRB1*14:02L
GRTILGSALLEDEFTP

SEQ ID NO: 22249 - protein, 14 aa, Severe acute respiratory syndrome coronavirus 2
  REGION 1..14: note = Table B: HLA-DRB1*14:02L HLA-DRB1*08:01L HLA-DRB4*01:01L HLA-DRB1*04:10L HLA-DQA1*05:05-B1*03:01L HLA-DRB1*08:03L
SALLEDEFTPFDVV

SEQ ID NO: 22250 - protein, 19 aa, Severe acute respiratory syndrome coronavirus 2
  REGION 1..19: note = Table B: HLA-DRB1*14:02L HLA-DPA1*01:03-B1*04:02L
TPFDVVRQCSGVTFQSAVK

SEQ ID NO: 22251 - protein, 14 aa, Severe acute respiratory syndrome coronavirus 2
  REGION 1..14: note = Table B: HLA-DRB1*14:02L HLA-DPA1*01:03-B1*04:02L
YFNMVYMPASWVMR

SEQ ID NO: 22252 - protein, 13 aa, Severe acute respiratory syndrome coronavirus 2
  REGION 1..13: note = Table B: HLA-DRB1*14:02L HLA-DQA1*01-B1*05L HLA-DQA1*05:05-B1*03:19L HLA-DQA1*05:05-B1*03:01L
LQQLRVESSSKLW

SEQ ID NO: 22253 - protein, 18 aa, Severe acute respiratory syndrome coronavirus 2
  REGION 1..18: note = Table B: HLA-DRB1*14:02L
VDINKLCEEMLDNRATLQ

SEQ ID NO: 22254 - protein, 12 aa, Severe acute respiratory syndrome coronavirus 2
  REGION 1..12: note = Table B: HLA-DRB1*14:02L
EFDRDAAMQRKL

SEQ ID NO: 22255 - protein, 18 aa, Severe acute respiratory syndrome coronavirus 2
  REGION 1..18: note = Table B: HLA-DRB1*14:02L HLA-DPA1*01:03-B1*104:01L
VTSAMQTMLFTMLRKLDN

SEQ ID NO: 22256 - protein, 15 aa, Severe acute respiratory syndrome coronavirus 2
  REGION 1..15: note = Table B: HLA-DRB1*14:02L
QTMLFTMLRKLDNDA

SEQ ID NO: 22257 - protein, 16 aa, Severe acute respiratory syndrome coronavirus 2
  REGION 1..16: note = Table B: HLA-DRB1*14:02L HLA-DRB1*11:01L HLA-DQA1*05:05-B1*03:19L
GGRFVLALLSDLQDLK

SEQ ID NO: 22258 - protein, 16 aa, Severe acute respiratory syndrome coronavirus 2
  REGION 1..16: note = Table B: HLA-DRB1*14:02L HLA-DPA1*01:03-B1*104:01L
LSDLQDLKWARFPKSD

SEQ ID NO: 22259 - protein, 13 aa, Severe acute respiratory syndrome coronavirus 2
  REGION 1..13: note = Table B: HLA-DRB1*14:02L
GTIYTELEPPCRF

SEQ ID NO: 22260 - protein, 14 aa, Severe acute respiratory syndrome coronavirus 2
  REGION 1..14: note = Table B: HLA-DRB1*14:02L HLA-DPA1*02:01-B1*13:01L
YFIKGLNNLNRGMV

SEQ ID NO: 22261 - protein, 14 aa, Severe acute respiratory syndrome coronavirus 2
  REGION 1..14: note = Table B: HLA-DRB1*14:02L
GMVLGSLAATVRLQ

SEQ ID NO: 22262 - protein, 16 aa, Severe acute respiratory syndrome coronavirus 2
  REGION 1..16: note = Table B: HLA-DRB1*14:02L HLA-DQA1*05:05-B1*03:19L HLA-DQA1*05:05-B1*03:116L HLA-DPA1*01:03-B1*04:02L HLA-DRB1*12:01L HLA-DPA1*03:01-B1*105:01L HLA-DQA1*05:05-B1*03:01L HLA-DRB1*16:01L HLA-DRB1*08:02L
GQPITNCVKMLCTHTG

SEQ ID NO: 22263 - protein, 19 aa, Severe acute respiratory syndrome coronavirus 2
  REGION 1..19: note = Table B: HLA-DRB1*14:02L HLA-DPA1*03:01-B1*105:01L
PNPKGFCDLKGKYVQIPTT

SEQ ID NO: 22264 - protein, 17 aa, Severe acute respiratory syndrome coronavirus 2
  REGION 1..17: note = Table B: HLA-DRB1*14:02L
DEDDNLIDSYFVVKRHT

SEQ ID NO: 22265 - protein, 13 aa, Severe acute respiratory syndrome coronavirus 2
  REGION 1..13: note = Table B: HLA-DRB1*14:02L HLA-DPA1*01:03-B1*04:02L HLA-DPA1*01:03-B1*02:01L HLA-DRB1*08:02L
IDSYFVVKRHTFS

SEQ ID NO: 22266 - protein, 16 aa, Severe acute respiratory syndrome coronavirus 2
  REGION 1..16: note = Table B: HLA-DRB1*14:02L HLA-DPA1*01:03-B1*104:01L
IYNLLKDCPAVAKHDF

SEQ ID NO: 22267 - protein, 16 aa, Severe acute respiratory syndrome coronavirus 2
  REGION 1..16: note = Table B: HLA-DRB1*14:02L HLA-DQA1*05:05-B1*03:19L HLA-DQA1*05:05-B1*03:01L
YNLLKDCPAVAKHDFF

SEQ ID NO: 22268 - protein, 16 aa, Severe acute respiratory syndrome coronavirus 2
  REGION 1..16: note = Table B: HLA-DRB1*14:02L
VDSYYSLLMPILTLTR

SEQ ID NO: 22269 - protein, 16 aa, Severe acute respiratory syndrome coronavirus 2
  REGION 1..16: note = Table B: HLA-DRB1*14:02L
ILTLTRALTAESHVDT

SEQ ID NO: 22270 - protein, 15 aa, Severe acute respiratory syndrome coronavirus 2
  REGION 1..15: note = Table B: HLA-DRB1*14:02L HLA-DRB1*11:01L HLA-DQA1*05:01-B1*02:01L
TKPYIKWDLLKYDFT

SEQ ID NO: 22271 - protein, 16 aa, Severe acute respiratory syndrome coronavirus 2
  REGION 1..16: note = Table B: HLA-DRB1*14:02L HLA-DPA1*01:03-B1*104:01L HLA-DRB1*08:03L
KPYIKWDLLKYDFTEE

SEQ ID NO: 22272 - protein, 14 aa, Severe acute respiratory syndrome coronavirus 2
  REGION 1..14: note = Table B: HLA-DRB1*14:02L HLA-DRB1*15:01L
PAMHAASGNLLLDK

SEQ ID NO: 22273 - protein, 13 aa, Severe acute respiratory syndrome coronavirus 2
  REGION 1..13: note = Table B: HLA-DRB1*14:02L HLA-DPA1*01:03-B1*04:01L HLA-DPA1*01:03-B1*02:01L HLA-DPA1*01:03-B1*104:01L HLA-DRB1*07:01L
YYRYNLPTMCDIR

SEQ ID NO: 22274 - protein, 16 aa, Severe acute respiratory syndrome coronavirus 2
  REGION 1..16: note = Table B: HLA-DRB1*14:02L HLA-DRB3*01:01L HLA-DPA1*01:03-B1*104:01L
KARLYYDSMSYEDQDA

SEQ ID NO: 22275 - protein, 16 aa, Severe acute respiratory syndrome coronavirus 2
  REGION 1..16: note = Table B: HLA-DRB1*14:02L HLA-DPA1*01:03-B1*104:01L
ARLYYDSMSYEDQDAL

SEQ ID NO: 22276 - protein, 18 aa, Severe acute respiratory syndrome coronavirus 2
  REGION 1..18: note = Table B: HLA-DRB1*14:02L
VIPTITQMNLKYAISAKN

SEQ ID NO: 22277 - protein, 18 aa, Severe acute respiratory syndrome coronavirus 2
  REGION 1..18: note = Table B: HLA-DRB1*14:02L
IPTITQMNLKYAISAKNR

SEQ ID NO: 22278 - protein, 13 aa, Severe acute respiratory syndrome coronavirus 2
  REGION 1..13: note = Table B: HLA-DRB1*14:02L HLA-DQA1*05:05-B1*03:116L HLA-DPA1*01:03-B1*04:02L HLA-DPA1*01:03-B1*02:01L HLA-DRB1*08:02L
NLKYAISAKNRAR

SEQ ID NO: 22279 - protein, 18 aa, Severe acute respiratory syndrome coronavirus 2
  REGION 1..18: note = Table B: HLA-DRB1*14:02L
TNRQFHQKLLKSIAATRG

SEQ ID NO: 22280 - protein, 17 aa, Severe acute respiratory syndrome coronavirus 2
  REGION 1..17: note = Table B: HLA-DRB1*14:02L
SHRFYRLANECAQVLSE

SEQ ID NO: 22281 - protein, 16 aa, Severe acute respiratory syndrome coronavirus 2
  REGION 1..16: note = Table B: HLA-DRB1*14:02L HLA-DQA1*05:01-B1*02:01L HLA-DPA1*03:01-B1*105:01L
GSLYVKPGGTSSGDAT

SEQ ID NO: 22282 - protein, 14 aa, Severe acute respiratory syndrome coronavirus 2
  REGION 1..14: note = Table B: HLA-DRB1*14:02L HLA-DRB1*08:02L
NEFYAYLRKHFSMM

SEQ ID NO: 22283 - protein, 11 aa, Severe acute respiratory syndrome coronavirus 2
  REGION 1..11: note = Table B: HLA-DRB1*14:02L HLA-DQA1*05:05-B1*03:116L HLA-DPA1*01:03-B1*04:02L HLA-DPA1*03:01-B1*105:01L HLA-DQA1*01:03-B1*06:01L HLA-DRB1*08:02L
ETDLTKGPHEF

SEQ ID NO: 22284 - protein, 16 aa, Severe acute respiratory syndrome coronavirus 2
  REGION 1..16: note = Table B: HLA-DRB1*14:02L HLA-DPA1*01:03-B1*04:01L
FVSLAIDAYPLTKHPN

SEQ ID NO: 22285 - protein, 16 aa, Severe acute respiratory syndrome coronavirus 2
  REGION 1..16: note = Table B: HLA-DRB1*14:02L
ADVFHLYLQYIRKLHD

SEQ ID NO: 22286 - protein, 16 aa, Severe acute respiratory syndrome coronavirus 2
  REGION 1..16: note = Table B: HLA-DRB1*14:02L
VFHLYLQYIRKLHDEL

SEQ ID NO: 22287 - protein, 16 aa, Severe acute respiratory syndrome coronavirus 2
  REGION 1..16: note = Table B: HLA-DRB1*14:02L
LGGMSYYCKSHKPPIS

SEQ ID NO: 22288 - protein, 14 aa, Severe acute respiratory syndrome coronavirus 2
  REGION 1..14: note = Table B: HLA-DRB1*14:02L HLA-DRB1*08:01L HLA-DRB1*11:01L
ETFKLSYGIATVRE

SEQ ID NO: 22289 - protein, 18 aa, Severe acute respiratory syndrome coronavirus 2
  REGION 1..18: note = Table B: HLA-DRB1*14:02L
FKLSYGIATVREVLSDRE

SEQ ID NO: 22290 - protein, 18 aa, Severe acute respiratory syndrome coronavirus 2
  REGION 1..18: note = Table B: HLA-DRB1*14:02L
SDRELHLSWEVGKPRPPL

SEQ ID NO: 22291 - protein, 18 aa, Severe acute respiratory syndrome coronavirus 2
  REGION 1..18: note = Table B: HLA-DRB1*14:02L
DRELHLSWEVGKPRPPLN

SEQ ID NO: 22292 - protein, 16 aa, Severe acute respiratory syndrome coronavirus 2
  REGION 1..16: note = Table B: HLA-DRB1*14:02L HLA-DPA1*01:03-B1*04:02L
YVRITGLYPTLNISDE

SEQ ID NO: 22293 - protein, 16 aa, Severe acute respiratory syndrome coronavirus 2
  REGION 1..16: note = Table B: HLA-DRB1*14:02L
EKALKYLPIDKCSRII

SEQ ID NO: 22294 - protein, 16 aa, Severe acute respiratory syndrome coronavirus 2
  REGION 1..16: note = Table B: HLA-DRB1*14:02L
KALKYLPIDKCSRIIP

SEQ ID NO: 22295 - protein, 16 aa, Severe acute respiratory syndrome coronavirus 2
  REGION 1..16: note = Table B: HLA-DRB1*14:02L HLA-DQA1*05:05-B1*03:19L
EPEYFNSVCRLMKTIG

SEQ ID NO: 22296 - protein, 11 aa, Severe acute respiratory syndrome coronavirus 2
  REGION 1..11: note = Table B: HLA-DRB1*14:02L
RLMKTIGPDMF

SEQ ID NO: 22297 - protein, 16 aa, Severe acute respiratory syndrome coronavirus 2
  REGION 1..16: note = Table B: HLA-DRB1*14:02L
KLQFTSLEIPRRNVAT

SEQ ID NO: 22298 - protein, 16 aa, Severe acute respiratory syndrome coronavirus 2
  REGION 1..16: note = Table B: HLA-DRB1*14:02L HLA-DRB1*11:01L HLA-DQA1*05:01-B1*02:01L HLA-DPA1*01:03-B1*104:01L
IGFDVEGCHATREAVG

SEQ ID NO: 22299 - protein, 16 aa, Severe acute respiratory syndrome coronavirus 2
  REGION 1..16: note = Table B: HLA-DRB1*14:02L
IKIVQMLSDTLKNLSD

SEQ ID NO: 22300 - protein, 17 aa, Severe acute respiratory syndrome coronavirus 2
  REGION 1..17: note = Table B: HLA-DRB1*14:02L HLA-DQA1*05:05-B1*03:19L
IVQMLSDTLKNLSDRVV

SEQ ID NO: 22301 - protein, 15 aa, Severe acute respiratory syndrome coronavirus 2
  REGION 1..15: note = Table B: HLA-DRB1*14:02L HLA-DPA1*01:03-B1*04:02L
IDVQQWGFTGNLQSN

SEQ ID NO: 22302 - protein, 16 aa, Severe acute respiratory syndrome coronavirus 2
  REGION 1..16: note = Table B: HLA-DRB1*14:02L
DELKINAACRKVQHMV

SEQ ID NO: 22303 - protein, 16 aa, Severe acute respiratory syndrome coronavirus 2
  REGION 1..16: note = Table B: HLA-DRB1*14:02L
EYRLYLDAYNMMISAG

SEQ ID NO: 22304 - protein, 14 aa, Severe acute respiratory syndrome coronavirus 2
  REGION 1..14: note = Table B: HLA-DRB1*14:02L
YKQFDTYNLWNTFT

SEQ ID NO: 22305 - protein, 13 aa, Severe acute respiratory syndrome coronavirus 2
  REGION 1..13: note = Table B: HLA-DRB1*14:02L HLA-DRB4*01:01L HLA-DRB1*09:01L HLA-DRB3*01:01L HLA-DPA1*01:03-B1*104:01L HLA-DRB1*07:01L HLA-DRB1*08:02L
NTFTRLQSLENVA

SEQ ID NO: 22306 - protein, 13 aa, Severe acute respiratory syndrome coronavirus 2
  REGION 1..13: note = Table B: HLA-DRB1*14:02L
LENVAFNVVNKGH

SEQ ID NO: 22307 - protein, 12 aa, Severe acute respiratory syndrome coronavirus 2
  REGION 1..12: note = Table B: HLA-DRB1*14:02L
SIINNTVYTKVD

SEQ ID NO: 22308 - protein, 13 aa, Severe acute respiratory syndrome coronavirus 2
  REGION 1..13: note = Table B: HLA-DRB1*14:02L
GVDIAANTVIWDY

SEQ ID NO: 22309 - protein, 15 aa, Severe acute respiratory syndrome coronavirus 2
  REGION 1..15: note = Table B: HLA-DRB1*14:02L
DGQVDLFRNARNGVL

SEQ ID NO: 22310 - protein, 14 aa, Severe acute respiratory syndrome coronavirus 2
  REGION 1..14: note = Table B: HLA-DRB1*14:02L HLA-DPA1*01:03-B1*04:02L
EFIERYKLEGYAFE

SEQ ID NO: 22311 - protein, 15 aa, Severe acute respiratory syndrome coronavirus 2
  REGION 1..15: note = Table B: HLA-DRB1*14:02L HLA-DQA1*05:05-B1*03:01L
IERYKLEGYAFEHIV

SEQ ID NO: 22312 - protein, 14 aa, Severe acute respiratory syndrome coronavirus 2
  REGION 1..14: note = Table B: HLA-DRB1*14:02L
LLLDDFVEIIKSQD

SEQ ID NO: 22313 - protein, 16 aa, Severe acute respiratory syndrome coronavirus 2
  REGION 1..16: note = Table B: HLA-DRB1*14:02L
SQDLSVVSKVVKVTID

SEQ ID NO: 22314 - protein, 18 aa, Severe acute respiratory syndrome coronavirus 2
  REGION 1..18: note = Table B: HLA-DRB1*14:02L HLA-DQA1*05:05-B1*03:01L
IDYTEISFMLWCKDGHVE

SEQ ID NO: 22315 - protein, 18 aa, Severe acute respiratory syndrome coronavirus 2
  REGION 1..18: note = Table B: HLA-DRB1*14:02L
ISFMLWCKDGHVETFYPK

SEQ ID NO: 22316 - protein, 16 aa, Severe acute respiratory syndrome coronavirus 2
  REGION 1..16: note = Table B: HLA-DRB1*14:02L HLA-DRB1*08:02L
DGHVETFYPKLQSSQA

SEQ ID NO: 22317 - protein, 14 aa, Severe acute respiratory syndrome coronavirus 2
  REGION 1..14: note = Table B: HLA-DRB1*14:02L HLA-DQA1*01:03-B1*06:01L
VAKYTQLCQYLNTL

SEQ ID NO: 22318 - protein, 17 aa, Severe acute respiratory syndrome coronavirus 2
  REGION 1..17: note = Table B: HLA-DRB1*14:02L HLA-DPA1*01:03-B1*04:01L HLA-DRB1*08:03L
VPYNMRVIHFGAGSDKG

SEQ ID NO: 22319 - protein, 16 aa, Severe acute respiratory syndrome coronavirus 2
  REGION 1..16: note = Table B: HLA-DRB1*14:02L
KLALGGSVAIKITEHS

SEQ ID NO: 22320 - protein, 16 aa, Severe acute respiratory syndrome coronavirus 2
  REGION 1..16: note = Table B: HLA-DRB1*14:02L
SEAFLIGCNYLGKPRE

SEQ ID NO: 22321 - protein, 15 aa, Severe acute respiratory syndrome coronavirus 2
  REGION 1..15: note = Table B: HLA-DRB1*14:02L
INDMILSLLSKGRLI

SEQ ID NO: 22322 - protein, 16 aa, Severe acute respiratory syndrome coronavirus 2
  REGION 1..16: note = Table B: HLA-DRB1*14:02L
NDMILSLLSKGRLIIR

SEQ ID NO: 22323 - protein, 17 aa, Severe acute respiratory syndrome coronavirus 2
  REGION 1..17: note = Table B: HLA-DRB1*14:02L
DMILSLLSKGRLIIREN

SEQ ID NO: 22324 - protein, 11 aa, Severe acute respiratory syndrome coronavirus 2
  REGION 1..11: note = Table B: HLA-DRB1*14:02L HLA-DQA1*05:05-B1*03:19L HLA-DPA1*01:03-B1*04:01L HLA-DPA1*01:03-B1*04:02L HLA-DPA1*03:01-B1*105:01L HLA-DQA1*02:01-B1*03:03L
RVYSSANNCTF

SEQ ID NO: 22325 - protein, 13 aa, Severe acute respiratory syndrome coronavirus 2
  REGION 1..13: note = Table B: HLA-DRB1*14:02L
ALEPLVDLPIGIN

SEQ ID NO: 22326 - protein, 16 aa, Severe acute respiratory syndrome coronavirus 2
  REGION 1..16: note = Table B: HLA-DRB1*14:02L
GINITRFQTLLALHRS

SEQ ID NO: 22327 - protein, 15 aa, Severe acute respiratory syndrome coronavirus 2
  REGION 1..15: note = Table B: HLA-DRB1*14:02L
ITRFQTLLALHRSYL

SEQ ID NO: 22328 - protein, 16 aa, Severe acute respiratory syndrome coronavirus 2
  REGION 1..16: note = Table B: HLA-DRB1*14:02L
SFSTFKCYGVSPTKLN

SEQ ID NO: 22329 - protein, 16 aa, Severe acute respiratory syndrome coronavirus 2
  REGION 1..16: note = Table B: HLA-DRB1*14:02L
FSTFKCYGVSPTKLND

SEQ ID NO: 22330 - protein, 15 aa, Severe acute respiratory syndrome coronavirus 2
  REGION 1..15: note = Table B: HLA-DRB1*14:02L
STNLVKNKCVNFNFN

SEQ ID NO: 22331 - protein, 14 aa, Severe acute respiratory syndrome coronavirus 2
  REGION 1..14: note = Table B: HLA-DRB1*14:02L
NFNFNGLTGTGVLT

SEQ ID NO: 22332 - protein, 15 aa, Severe acute respiratory syndrome coronavirus 2
  REGION 1..15: note = Table B: HLA-DRB1*14:02L HLA-DRB1*07:01L
NKKFLPFQQFGRDIA

SEQ ID NO: 22333 - protein, 16 aa, Severe acute respiratory syndrome coronavirus 2
  REGION 1..16: note = Table B: HLA-DRB1*14:02L
KKFLPFQQFGRDIADT

SEQ ID NO: 22334 - protein, 16 aa, Severe acute respiratory syndrome coronavirus 2
  REGION 1..16: note = Table B: HLA-DRB1*14:02L HLA-DPA1*01:03-B1*04:02L
SNVFQTRAGCLIGAEH

SEQ ID NO: 22335 - protein, 15 aa, Severe acute respiratory syndrome coronavirus 2
  REGION 1..15: note = Table B: HLA-DRB1*14:02L
SNLLLQYGSFCTQLN

SEQ ID NO: 22336 - protein, 18 aa, Severe acute respiratory syndrome coronavirus 2
  REGION 1..18: note = Table B: HLA-DRB1*14:02L HLA-DPA1*01:03-B1*04:01L HLA-DPA1*01:03-B1*04:02L HLA-DPA1*01:03-B1*104:01L
TPPIKDFGGFNFSQILPD

SEQ ID NO: 22337 - protein, 15 aa, Severe acute respiratory syndrome coronavirus 2
  REGION 1..15: note = Table B: HLA-DRB1*14:02L HLA-DRB1*07:01L
QTYVTQQLIRAAEIR

SEQ ID NO: 22338 - protein, 15 aa, Severe acute respiratory syndrome coronavirus 2
  REGION 1..15: note = Table B: HLA-DRB1*14:02L HLA-DRB1*11:01L HLA-DPA1*01:02-B1*04:01L
VTQQLIRAAEIRASA

SEQ ID NO: 22339 - protein, 11 aa, Severe acute respiratory syndrome coronavirus 2
  REGION 1..11: note = Table B: HLA-DRB1*14:02L
MSFPQSAPHGV

SEQ ID NO: 22340 - protein, 16 aa, Severe acute respiratory syndrome coronavirus 2
  REGION 1..16: note = Table B: HLA-DRB1*14:02L HLA-DQA1*01-B1*05L
IQKEIDRLNEVAKNLN

SEQ ID NO: 22341 - protein, 12 aa, Severe acute respiratory syndrome coronavirus 2
  REGION 1..12: note = Table B: HLA-DRB1*14:02L HLA-DPA1*01:03-B1*104:01L
VRATATIPIQAS

SEQ ID NO: 22342 - protein, 13 aa, Severe acute respiratory syndrome coronavirus 2
  REGION 1..13: note = Table B: HLA-DRB1*14:02L HLA-DQA1*05:05-B1*03:19L HLA-DRB1*13:01L HLA-DQA1*05:05-B1*03:116L HLA-DPA1*01:03-B1*04:02L HLA-DRB1*14:54L HLA-DRB1*08:02L HLA-DRB1*08:03L
SKIITLKKRWQLA

SEQ ID NO: 22343 - protein, 16 aa, Severe acute respiratory syndrome coronavirus 2
  REGION 1..16: note = Table B: HLA-DRB1*14:02L
SSIVITSGDGTTSPIS

SEQ ID NO: 22344 - protein, 16 aa, Severe acute respiratory syndrome coronavirus 2
  REGION 1..16: note = Table B: HLA-DRB1*14:02L HLA-DRB1*15:03L
IVITSGDGTTSPISEH

SEQ ID NO: 22345 - protein, 11 aa, Severe acute respiratory syndrome coronavirus 2
  REGION 1..11: note = Table B: HLA-DRB1*14:02L
QLSTDTGVEHV

SEQ ID NO: 22346 - protein, 12 aa, Severe acute respiratory syndrome coronavirus 2
  REGION 1..12: note = Table B: HLA-DRB1*14:02L HLA-DQA1*05:05-B1*03:19L
FIYNKIVDEPEE

SEQ ID NO: 22347 - protein, 15 aa, Severe acute respiratory syndrome coronavirus 2
  REGION 1..15: note = Table B: HLA-DRB1*14:02L
YSRVKNLNSSRVPDL

SEQ ID NO: 22348 - protein, 15 aa, Severe acute respiratory syndrome coronavirus 2
  REGION 1..15: note = Table B: HLA-DRB1*14:02L
SRVKNLNSSRVPDLL

SEQ ID NO: 22349 - protein, 16 aa, Severe acute respiratory syndrome coronavirus 2
  REGION 1..16: note = Table B: HLA-DRB1*14:02L
LQFAYANRNRFLYIIK

SEQ ID NO: 22350 - protein, 15 aa, Severe acute respiratory syndrome coronavirus 2
  REGION 1..15: note = Table B: HLA-DRB1*14:02L
IASFRLFARTRSMWS

SEQ ID NO: 22351 - protein, 20 aa, Severe acute respiratory syndrome coronavirus 2
  REGION 1..20: note = Table B: HLA-DRB1*14:02L
VPLHGTILTRPLLESELVIG

SEQ ID NO: 22352 - protein, 17 aa, Severe acute respiratory syndrome coronavirus 2
  REGION 1..17: note = Table B: HLA-DRB1*14:02L
GAVILRGHLRIAGHHLG

SEQ ID NO: 22353 - protein, 13 aa, Severe acute respiratory syndrome coronavirus 2
  REGION 1..13: note = Table B: HLA-DRB1*14:02L
NYKLNTDHSSSSD

SEQ ID NO: 22354 - protein, 16 aa, Severe acute respiratory syndrome coronavirus 2
  REGION 1..16: note = Table B: HLA-DRB1*14:02L
EILLIIMRTFKVSIWN

SEQ ID NO: 22355 - protein, 15 aa, Severe acute respiratory syndrome coronavirus 2
  REGION 1..15: note = Table B: HLA-DRB1*14:02L
ELYHYQECVRGTTVL

SEQ ID NO: 22356 - protein, 13 aa, Severe acute respiratory syndrome coronavirus 2
  REGION 1..13: note = Table B: HLA-DRB1*14:02L HLA-DPA1*01:03-B1*04:02L HLA-DPA1*02:01-B1*13:01L HLA-DPA1*03:01-B1*105:01L HLA-DPA1*01:03-B1*02:01L HLA-DRB1*07:01L HLA-DQA1*01:03-B1*06:01L HLA-DRB1*08:02L
HVYQLRARSVSPK

SEQ ID NO: 22357 - protein, 16 aa, Severe acute respiratory syndrome coronavirus 2
  REGION 1..16: note = Table B: HLA-DRB1*14:02L HLA-DQA1*05:05-B1*03:116L HLA-DPA1*02:01-B1*13:01L
YFYYLGTGPEAGLPYG

SEQ ID NO: 22358 - protein, 16 aa, Severe acute respiratory syndrome coronavirus 2
  REGION 1..16: note = Table B: HLA-DRB1*14:02L
GGDAALALLLLDRLNQ

SEQ ID NO: 22359 - protein, 13 aa, Severe acute respiratory syndrome coronavirus 2
  REGION 1..13: note = Table B: HLA-DRB1*14:02L HLA-DPA1*02:01-B1*13:01L
FGDQELIRQGTDY

SEQ ID NO: 22360 - protein, 16 aa, Severe acute respiratory syndrome coronavirus 2
  REGION 1..16: note = Table B: HLA-DRB1*14:02L HLA-DRB3*01:01L HLA-DPA1*01:03-B1*104:01L HLA-DRB1*07:01L
SKQLQQSMSSADSTQA

SEQ ID NO: 22361 - protein, 13 aa, Severe acute respiratory syndrome coronavirus 2
  REGION 1..13: note = Table B: HLA-DQA1*01:01-B1*05:01L
ELNGGAYTRYVDN

SEQ ID NO: 22362 - protein, 16 aa, Severe acute respiratory syndrome coronavirus 2
  REGION 1..16: note = Table B: HLA-DQA1*01:01-B1*05:01L HLA-DQA1*05:05-B1*03:19L HLA-DPA1*03:01-B1*105:01L HLA-DQA1*05:05-B1*03:01L
EDEEEGDCEEEEFEPS

SEQ ID NO: 22363 - protein, 14 aa, Severe acute respiratory syndrome coronavirus 2
  REGION 1..14: note = Table B: HLA-DQA1*01:01-B1*05:01L HLA-DRB1*08:01L HLA-DRB1*13:01L
EEEEFEPSTQYEYG

SEQ ID NO: 22364 - protein, 15 aa, Severe acute respiratory syndrome coronavirus 2
  REGION 1..15: note = Table B: HLA-DQA1*01:01-B1*05:01L HLA-DRB1*15:03L
NQTTTIQTIVEVQPQ

SEQ ID NO: 22365 - protein, 11 aa, Severe acute respiratory syndrome coronavirus 2
  REGION 1..11: note = Table B: HLA-DQA1*01:01-B1*05:01L
VAGALNKATNN

SEQ ID NO: 22366 - protein, 15 aa, Severe acute respiratory syndrome coronavirus 2
  REGION 1..15: note = Table B: HLA-DQA1*01:01-B1*05:01L HLA-DPA1*01:03-B1*104:01L HLA-DRB1*08:03L
IQLLKSAYENFNQHE

SEQ ID NO: 22367 - protein, 15 aa, Severe acute respiratory syndrome coronavirus 2
  REGION 1..15: note = Table B: HLA-DQA1*01:01-B1*05:01L
TNVYLAVFDKNLYDK

SEQ ID NO: 22368 - protein, 13 aa, Severe acute respiratory syndrome coronavirus 2
  REGION 1..13: note = Table B: HLA-DQA1*01:01-B1*05:01L HLA-DPA1*01:02-B1*04:01L
FLEMKSEKQVEQK

SEQ ID NO: 22369 - protein, 11 aa, Severe acute respiratory syndrome coronavirus 2
  REGION 1..11: note = Table B: HLA-DQA1*01:01-B1*05:01L
EEVTTTLEETK

SEQ ID NO: 22370 - protein, 11 aa, Severe acute respiratory syndrome coronavirus 2
  REGION 1..11: note = Table B: HLA-DQA1*01:01-B1*05:01L
DNINLHTQVVD

SEQ ID NO: 22371 - protein, 12 aa, Severe acute respiratory syndrome coronavirus 2
  REGION 1..12: note = Table B: HLA-DQA1*01:01-B1*05:01L
TFYVLPNDDTLR

SEQ ID NO: 22372 - protein, 14 aa, Severe acute respiratory syndrome coronavirus 2
  REGION 1..14: note = Table B: HLA-DQA1*01:01-B1*05:01L HLA-DRB1*08:03L
IELKFNPPALQDAY

SEQ ID NO: 22373 - protein, 14 aa, Severe acute respiratory syndrome coronavirus 2
  REGION 1..14: note = Table B: HLA-DQA1*01:01-B1*05:01L HLA-DRB4*02:01NL HLA-DRB1*13:01L HLA-DPA1*01:03-B1*02:01L
SPFVMMSAPPAQYE

SEQ ID NO: 22374 - protein, 14 aa, Severe acute respiratory syndrome coronavirus 2
  REGION 1..14: note = Table B: HLA-DQA1*01:01-B1*05:01L
GDVVAIDYKHYTPS

SEQ ID NO: 22375 - protein, 13 aa, Severe acute respiratory syndrome coronavirus 2
  REGION 1..13: note = Table B: HLA-DQA1*01:01-B1*05:01L HLA-DRB1*04:10L HLA-DPA1*02:01-B1*13:01L HLA-DQA1*05:05-B1*03:01L
VNNATNKATYKPN

SEQ ID NO: 22376 - protein, 13 aa, Severe acute respiratory syndrome coronavirus 2
  REGION 1..13: note = Table B: HLA-DQA1*01:01-B1*05:01L HLA-DRB4*01:01L HLA-DPA1*01:03-B1*104:01L HLA-DRB1*08:02L
NSFDVLKSEDAQG

SEQ ID NO: 22377 - protein, 14 aa, Severe acute respiratory syndrome coronavirus 2
  REGION 1..14: note = Table B: HLA-DQA1*01:01-B1*05:01L HLA-DRB1*08:01L
ATHGLAAVNSVPWD

SEQ ID NO: 22378 - protein, 13 aa, Severe acute respiratory syndrome coronavirus 2
  REGION 1..13: note = Table B: HLA-DQA1*01:01-B1*05:01L HLA-DPA1*01:03-B1*02:01L HLA-DRB1*08:02L
LNKVVSTTTNIVT

SEQ ID NO: 22379 - protein, 14 aa, Severe acute respiratory syndrome coronavirus 2
  REGION 1..14: note = Table B: HLA-DQA1*01:01-B1*05:01L
YREGYLNSTNVTIA

SEQ ID NO: 22380 - protein, 15 aa, Severe acute respiratory syndrome coronavirus 2
  REGION 1..15: note = Table B: HLA-DQA1*01:01-B1*05:01L HLA-DRB1*08:01L HLA-DPA1*02:01-B1*13:01L
LSGLDSLDTYPSLET

SEQ ID NO: 22381 - protein, 14 aa, Severe acute respiratory syndrome coronavirus 2
  REGION 1..14: note = Table B: HLA-DQA1*01:01-B1*05:01L
RPINPTDQSSYIVD

SEQ ID NO: 22382 - protein, 13 aa, Severe acute respiratory syndrome coronavirus 2
  REGION 1..13: note = Table B: HLA-DQA1*01:01-B1*05:01L HLA-DRB1*04:08L
ESSAKSASVYYSQ

SEQ ID NO: 22383 - protein, 12 aa, Severe acute respiratory syndrome coronavirus 2
  REGION 1..12: note = Table B: HLA-DQA1*01:01-B1*05:01L
QGFVDSDVETKD

SEQ ID NO: 22384 - protein, 14 aa, Severe acute respiratory syndrome coronavirus 2
  REGION 1..14: note = Table B: HLA-DQA1*01:01-B1*05:01L
TTRQVVNVVTTKIA

SEQ ID NO: 22385 - protein, 16 aa, Severe acute respiratory syndrome coronavirus 2
  REGION 1..16: note = Table B: HLA-DQA1*01:01-B1*05:01L HLA-DRB4*01:01L HLA-DQA1*05:05-B1*03:116L HLA-DRB1*09:01L HLA-DRB1*12:02L HLA-DRB1*15:01L
SGRWVLNNDYYRSLPG

SEQ ID NO: 22386 - protein, 12 aa, Severe acute respiratory syndrome coronavirus 2
  REGION 1..12: note = Table B: HLA-DQA1*01:01-B1*05:01L
SGAMDTTSYREA

SEQ ID NO: 22387 - protein, 12 aa, Severe acute respiratory syndrome coronavirus 2
  REGION 1..12: note = Table B: HLA-DQA1*01:01-B1*05:01L HLA-DPA1*02:01-B1*13:01L
GAMDTTSYREAA

SEQ ID NO: 22388 - protein, 14 aa, Severe acute respiratory syndrome coronavirus 2
  REGION 1..14: note = Table B: HLA-DQA1*01:01-B1*05:01L
NGRTILGSALLEDE

SEQ ID NO: 22389 - protein, 11 aa, Severe acute respiratory syndrome coronavirus 2
  REGION 1..11: note = Table B: HLA-DQA1*01:01-B1*05:01L HLA-DPA1*01:03-B1*04:02L HLA-DRB1*12:02L HLA-DPA1*01:02-B1*04:01L
DMVDTSLSGFK

SEQ ID NO: 22390 - protein, 11 aa, Severe acute respiratory syndrome coronavirus 2
  REGION 1..11: note = Table B: HLA-DQA1*01:01-B1*05:01L
SMQGAVDINKL

SEQ ID NO: 22391 - protein, 15 aa, Severe acute respiratory syndrome coronavirus 2
  REGION 1..15: note = Table B: HLA-DQA1*01:01-B1*05:01L HLA-DRB4*01:01L HLA-DPA1*01:02-B1*04:01L HLA-DRB1*15:01L
IASEFSSLPSYAAFA

SEQ ID NO: 22392 - protein, 14 aa, Severe acute respiratory syndrome coronavirus 2
  REGION 1..14: note = Table B: HLA-DQA1*01:01-B1*05:01L HLA-DRB3*01:01L HLA-DRB1*07:01L HLA-DRB1*15:03L
LKKSLNVAKSEFDR

SEQ ID NO: 22393 - protein, 14 aa, Severe acute respiratory syndrome coronavirus 2
  REGION 1..14: note = Table B: HLA-DQA1*01:01-B1*05:01L
VDADSKIVQLSEIS

SEQ ID NO: 22394 - protein, 12 aa, Severe acute respiratory syndrome coronavirus 2
  REGION 1..12: note = Table B: HLA-DQA1*01:01-B1*05:01L HLA-DRB1*09:01L HLA-DPA1*01:03-B1*02:01L HLA-DRB1*07:01L
FAVDAAKAYKDY

SEQ ID NO: 22395 - protein, 15 aa, Severe acute respiratory syndrome coronavirus 2
  REGION 1..15: note = Table B: HLA-DQA1*01:01-B1*05:01L HLA-DQA1*05:05-B1*03:19L HLA-DPA1*01:03-B1*04:01L HLA-DRB1*10:01L
AAKAYKDYLASGGQP

SEQ ID NO: 22396 - protein, 14 aa, Severe acute respiratory syndrome coronavirus 2
  REGION 1..14: note = Table B: HLA-DQA1*01:01-B1*05:01L
DEDDNLIDSYFVVK

SEQ ID NO: 22397 - protein, 13 aa, Severe acute respiratory syndrome coronavirus 2
  REGION 1..13: note = Table B: HLA-DQA1*01:01-B1*05:01L HLA-DRB1*08:01L HLA-DQA1*05:01-B1*02:01L HLA-DRB1*12:01L HLA-DPA1*02:01-B1*13:01L
LTRALTAESHVDT

SEQ ID NO: 22398 - protein, 13 aa, Severe acute respiratory syndrome coronavirus 2
  REGION 1..13: note = Table B: HLA-DQA1*01:01-B1*05:01L
ALTAESHVDTDLT

SEQ ID NO: 22399 - protein, 15 aa, Severe acute respiratory syndrome coronavirus 2
  REGION 1..15: note = Table B: HLA-DQA1*01:01-B1*05:01L
ELLVYAADPAMHAAS

SEQ ID NO: 22400 - protein, 14 aa, Severe acute respiratory syndrome coronavirus 2
  REGION 1..14: note = Table B: HLA-DQA1*01:01-B1*05:01L HLA-DPA1*01:03-B1*04:01L HLA-DPA1*01:03-B1*02:01L
VYAADPAMHAASGN

SEQ ID NO: 22401 - protein, 13 aa, Severe acute respiratory syndrome coronavirus 2
  REGION 1..13: note = Table B: HLA-DQA1*01:01-B1*05:01L
AADPAMHAASGNL

SEQ ID NO: 22402 - protein, 15 aa, Severe acute respiratory syndrome coronavirus 2
  REGION 1..15: note = Table B: HLA-DQA1*01:01-B1*05:01L HLA-DRB4*01:01L
DYYRYNLPTMCDIRQ

SEQ ID NO: 22403 - protein, 12 aa, Severe acute respiratory syndrome coronavirus 2
  REGION 1..12: note = Table B: HLA-DQA1*01:01-B1*05:01L HLA-DQA1*01-B1*05L HLA-DQA1*05:05-B1*03:01L HLA-DRB1*16:01L
NANQVIVNNLDK

SEQ ID NO: 22404 - protein, 14 aa, Severe acute respiratory syndrome coronavirus 2
  REGION 1..14: note = Table B: HLA-DQA1*01:01-B1*05:01L HLA-DRB5*01:01L HLA-DRB4*02:01NL HLA-DRB4*01:01L HLA-DRB1*09:01L HLA-DRB1*15:01L
DALFAYTKRNVIPT

SEQ ID NO: 22405 - protein, 13 aa, Severe acute respiratory syndrome coronavirus 2
  REGION 1..13: note = Table B: HLA-DQA1*01:01-B1*05:01L HLA-DQA1*05:05-B1*03:19L HLA-DQA1*05:05-B1*03:01L HLA-DRB1*04:08L
LPYPDPSRILGAG

SEQ ID NO: 22406 - protein, 16 aa, Severe acute respiratory syndrome coronavirus 2
  REGION 1..16: note = Table B: HLA-DQA1*01:01-B1*05:01L HLA-DRB4*02:01NL HLA-DRB1*15:01L
SVMLTNDNTSRYWEPE

SEQ ID NO: 22407 - protein, 15 aa, Severe acute respiratory syndrome coronavirus 2
  REGION 1..15: note = Table B: HLA-DQA1*01:01-B1*05:01L
AVVYRGTTTYKLNVG

SEQ ID NO: 22408 - protein, 11 aa, Severe acute respiratory syndrome coronavirus 2
  REGION 1..11: note = Table B: HLA-DQA1*01:01-B1*05:01L HLA-DQA1*05:05-B1*03:19L
GDPAQLPAPRT

SEQ ID NO: 22409 - protein, 12 aa, Severe acute respiratory syndrome coronavirus 2
  REGION 1..12: note = Table B: HLA-DQA1*01:01-B1*05:01L
LTKGTLEPEYFN

SEQ ID NO: 22410 - protein, 16 aa, Severe acute respiratory syndrome coronavirus 2
  REGION 1..16: note = Table B: HLA-DQA1*01:01-B1*05:01L HLA-DPA1*01:03-B1*04:01L
VSALVYDNKLKAHKDK

SEQ ID NO: 22411 - protein, 14 aa, Severe acute respiratory syndrome coronavirus 2
  REGION 1..14: note = Table B: HLA-DQA1*01:01-B1*05:01L
YKGVITHDVSSAIN

SEQ ID NO: 22412 - protein, 15 aa, Severe acute respiratory syndrome coronavirus 2
  REGION 1..15: note = Table B: HLA-DQA1*01:01-B1*05:01L
KGVITHDVSSAINRP

SEQ ID NO: 22413 - protein, 14 aa, Severe acute respiratory syndrome coronavirus 2
  REGION 1..14: note = Table B: HLA-DQA1*01:01-B1*05:01L HLA-DRB1*11:01L HLA-DRB4*01:01L HLA-DPA1*01:03-B1*04:01L HLA-DPA1*01:03-B1*04:02L HLA-DRB3*01:01L
VASKILGLPTQTVD

SEQ ID NO: 22414 - protein, 13 aa, Severe acute respiratory syndrome coronavirus 2
  REGION 1..13: note = Table B: HLA-DQA1*01:01-B1*05:01L HLA-DRB1*08:02L
GFKMNYQVNGYPN

SEQ ID NO: 22415 - protein, 16 aa, Severe acute respiratory syndrome coronavirus 2
  REGION 1..16: note = Table B: HLA-DQA1*01:01-B1*05:01L HLA-DPA1*02:01-B1*13:01L HLA-DQA1*05:05-B1*03:01L
TPNNTDFSRVSAKPPP

SEQ ID NO: 22416 - protein, 13 aa, Severe acute respiratory syndrome coronavirus 2
  REGION 1..13: note = Table B: HLA-DQA1*01:01-B1*05:01L HLA-DQA1*05:05-B1*03:01L
FHTPAFDKSAFVN

SEQ ID NO: 22417 - protein, 12 aa, Severe acute respiratory syndrome coronavirus 2
  REGION 1..12: note = Table B: HLA-DQA1*01:01-B1*05:01L HLA-DQA1*05:01-B1*02:01L HLA-DQA1*05:05-B1*03:01L
GQQGEVPVSIIN

SEQ ID NO: 22418 - protein, 16 aa, Severe acute respiratory syndrome coronavirus 2
  REGION 1..16: note = Table B: HLA-DQA1*01:01-B1*05:01L HLA-DRB4*02:01NL HLA-DRB1*13:01L HLA-DRB1*15:01L
VPVSIINNTVYTKVDG

SEQ ID NO: 22419 - protein, 14 aa, Severe acute respiratory syndrome coronavirus 2
  REGION 1..14: note = Table B: HLA-DQA1*01:01-B1*05:01L HLA-DRB1*04:08L
DADSTLIGDCATVH

SEQ ID NO: 22420 - protein, 15 aa, Severe acute respiratory syndrome coronavirus 2
  REGION 1..15: note = Table B: HLA-DQA1*01:01-B1*05:01L
IFWRNTNPIQLSSYS

SEQ ID NO: 22421 - protein, 13 aa, Severe acute respiratory syndrome coronavirus 2
  REGION 1..13: note = Table B: HLA-DQA1*01:01-B1*05:01L HLA-DRB1*14:54L HLA-DRB1*04:08L
LTTRTQLPPAYTN

SEQ ID NO: 22422 - protein, 16 aa, Severe acute respiratory syndrome coronavirus 2
  REGION 1..16: note = Table B: HLA-DQA1*01:01-B1*05:01L HLA-DRB1*09:01L
TRGVYYPDKVFRSSVL

SEQ ID NO: 22423 - protein, 11 aa, Severe acute respiratory syndrome coronavirus 2
  REGION 1..11: note = Table B: HLA-DQA1*01:01-B1*05:01L
GVYFASTEKSN

SEQ ID NO: 22424 - protein, 14 aa, Severe acute respiratory syndrome coronavirus 2
  REGION 1..14: note = Table B: HLA-DQA1*01:01-B1*05:01L HLA-DPA1*02:01-B1*13:01L HLA-DPA1*01:03-B1*104:01L
SKTQSLLIVNNATN

SEQ ID NO: 22425 - protein, 13 aa, Severe acute respiratory syndrome coronavirus 2
  REGION 1..13: note = Table B: HLA-DQA1*01:01-B1*05:01L
IYQTSNFRVQPTE

SEQ ID NO: 22426 - protein, 12 aa, Severe acute respiratory syndrome coronavirus 2
  REGION 1..12: note = Table B: HLA-DQA1*01:01-B1*05:01L HLA-DRB1*16:01L HLA-DRB1*04:08L
DYNYKLPDDFTG

SEQ ID NO: 22427 - protein, 12 aa, Severe acute respiratory syndrome coronavirus 2
  REGION 1..12: note = Table B: HLA-DQA1*01:01-B1*05:01L HLA-DQA1*05:05-B1*03:01L
TTDAVRDPQTLE

SEQ ID NO: 22428 - protein, 14 aa, Severe acute respiratory syndrome coronavirus 2
  REGION 1..14: note = Table B: HLA-DQA1*01:01-B1*05:01L
GAENSVAYSNNSIA

SEQ ID NO: 22429 - protein, 12 aa, Severe acute respiratory syndrome coronavirus 2
  REGION 1..12: note = Table B: HLA-DQA1*01:01-B1*05:01L HLA-DPA1*03:01-B1*105:01L HLA-DQA1*05:05-B1*03:01L
GVTQNVLYENQK

SEQ ID NO: 22430 - protein, 14 aa, Severe acute respiratory syndrome coronavirus 2
  REGION 1..14: note = Table B: HLA-DQA1*01:01-B1*05:01L HLA-DPA1*02:01-B1*13:01L
YEPQIITTDNTFVS

SEQ ID NO: 22431 - protein, 11 aa, Severe acute respiratory syndrome coronavirus 2
  REGION 1..11: note = Table B: HLA-DQA1*01:01-B1*05:01L
TTSPISEHDYQ

SEQ ID NO: 22432 - protein, 13 aa, Severe acute respiratory syndrome coronavirus 2
  REGION 1..13: note = Table B: HLA-DQA1*01:01-B1*05:01L
DGSSGVVNPVMEP

SEQ ID NO: 22433 - protein, 14 aa, Severe acute respiratory syndrome coronavirus 2
  REGION 1..14: note = Table B: HLA-DQA1*01:01-B1*05:01L
GSKSPIQYIDIGNY

SEQ ID NO: 22434 - protein, 13 aa, Severe acute respiratory syndrome coronavirus 2
  REGION 1..13: note = Table B: HLA-DQA1*01:01-B1*05:01L HLA-DRB1*08:01L
GTGPEAGLPYGAN

SEQ ID NO: 22435 - protein, 14 aa, Severe acute respiratory syndrome coronavirus 2
  REGION 1..14: note = Table B: HLA-DQA1*01:01-B1*05:01L HLA-DPA1*01:03-B1*04:02L HLA-DPA1*03:01-B1*105:01L
EGSRGGSQASSRSS

SEQ ID NO: 22436 - protein, 14 aa, Severe acute respiratory syndrome coronavirus 2
  REGION 1..14: note = Table B: HLA-DQA1*01:01-B1*05:01L HLA-DRB1*04:10L HLA-DRB1*04:08L
TSPARMAGNGGDAA

SEQ ID NO: 22437 - protein, 11 aa, Severe acute respiratory syndrome coronavirus 2
  REGION 1..11: note = Table B: HLA-DQA1*01:01-B1*05:01L HLA-DQA1*05:05-B1*03:19L
ADETQALPQRQ

SEQ ID NO: 22438 - protein, 13 aa, Severe acute respiratory syndrome coronavirus 2
  REGION 1..13: note = Table B: HLA-DRB1*08:01L HLA-DQA1*01-B1*05L HLA-DPA1*01:02-B1*04:01L
ELEGIQYGRSGET

SEQ ID NO: 22439 - protein, 12 aa, Severe acute respiratory syndrome coronavirus 2
  REGION 1..12: note = Table B: HLA-DRB1*08:01L
RKVLLRKNGNKG

SEQ ID NO: 22440 - protein, 14 aa, Severe acute respiratory syndrome coronavirus 2
  REGION 1..14: note = Table B: HLA-DRB1*08:01L HLA-DRB1*12:01L HLA-DRB1*16:01L
KVLLRKNGNKGAGG

SEQ ID NO: 22441 - protein, 13 aa, Severe acute respiratory syndrome coronavirus 2
  REGION 1..13: note = Table B: HLA-DRB1*08:01L
TKRGVYCCREHEH

SEQ ID NO: 22442 - protein, 12 aa, Severe acute respiratory syndrome coronavirus 2
  REGION 1..12: note = Table B: HLA-DRB1*08:01L
PFEIKLAKKFDT

SEQ ID NO: 22443 - protein, 11 aa, Severe acute respiratory syndrome coronavirus 2
  REGION 1..11: note = Table B: HLA-DRB1*08:01L
IIKTIQPRVEK

SEQ ID NO: 22444 - protein, 12 aa, Severe acute respiratory syndrome coronavirus 2
  REGION 1..12: note = Table B: HLA-DRB1*08:01L HLA-DQA1*03:01-B1*03:02L
IQPRVEKKKLDG

SEQ ID NO: 22445 - protein, 14 aa, Severe acute respiratory syndrome coronavirus 2
  REGION 1..14: note = Table B: HLA-DRB1*08:01L
LDGFMGRIRSVYPV

SEQ ID NO: 22446 - protein, 12 aa, Severe acute respiratory syndrome coronavirus 2
  REGION 1..12: note = Table B: HLA-DRB1*08:01L
TSWQTGDFVKAT

SEQ ID NO: 22447 - protein, 15 aa, Severe acute respiratory syndrome coronavirus 2
  REGION 1..15: note = Table B: HLA-DRB1*08:01L
VVKIYCPACHNSEVG

SEQ ID NO: 22448 - protein, 14 aa, Severe acute respiratory syndrome coronavirus 2
  REGION 1..14: note = Table B: HLA-DRB1*08:01L HLA-DRB1*16:01L HLA-DRB1*04:08L
VGPEHSLAEYHNES

SEQ ID NO: 22449 - protein, 15 aa, Severe acute respiratory syndrome coronavirus 2
  REGION 1..15: note = Table B: HLA-DRB1*08:01L
EGLNDNLLEILQKEK

SEQ ID NO: 22450 - protein, 11 aa, Severe acute respiratory syndrome coronavirus 2
  REGION 1..11: note = Table B: HLA-DRB1*08:01L HLA-DQA1*03:01-B1*03:02L HLA-DQA1*05:05-B1*03:01L HLA-DRB1*08:03L
AFVETVKGLDY

SEQ ID NO: 22451 - protein, 13 aa, Severe acute respiratory syndrome coronavirus 2
  REGION 1..13: note = Table B: HLA-DRB1*08:01L
VETVKGLDYKAFK

SEQ ID NO: 22452 - protein, 14 aa, Severe acute respiratory syndrome coronavirus 2
  REGION 1..14: note = Table B: HLA-DRB1*08:01L HLA-DRB1*07:01L HLA-DRB1*15:01L
KAAITILDGISQYS

SEQ ID NO: 22453 - protein, 14 aa, Severe acute respiratory syndrome coronavirus 2
  REGION 1..14: note = Table B: HLA-DRB1*08:01L
KLKPVLDWLEEKFK

SEQ ID NO: 22454 - protein, 13 aa, Severe acute respiratory syndrome coronavirus 2
  REGION 1..13: note = Table B: HLA-DRB1*08:01L
IIGGAKLKALNLG

SEQ ID NO: 22455 - protein, 11 aa, Severe acute respiratory syndrome coronavirus 2
  REGION 1..11: note = Table B: HLA-DRB1*08:01L
GLYRKCVKSRE

SEQ ID NO: 22456 - protein, 10 aa, Severe acute respiratory syndrome coronavirus 2
  REGION 1..10: note = Table B: HLA-DRB1*08:01L
YRKCVKSREE

SEQ ID NO: 22457 - protein, 13 aa, Severe acute respiratory syndrome coronavirus 2
  REGION 1..13: note = Table B: HLA-DRB1*08:01L
EVVLKTGDLQPLE

SEQ ID NO: 22458 - protein, 13 aa, Severe acute respiratory syndrome coronavirus 2
  REGION 1..13: note = Table B: HLA-DRB1*08:01L HLA-DRB1*04:08L
NGLMLLEIKDTEK

SEQ ID NO: 22459 - protein, 12 aa, Severe acute respiratory syndrome coronavirus 2
  REGION 1..12: note = Table B: HLA-DRB1*08:01L
NITFELDERIDK

SEQ ID NO: 22460 - protein, 14 aa, Severe acute respiratory syndrome coronavirus 2
  REGION 1..14: note = Table B: HLA-DRB1*08:01L
QYEYGTEDDYQGKP

SEQ ID NO: 22461 - protein, 14 aa, Severe acute respiratory syndrome coronavirus 2
  REGION 1..14: note = Table B: HLA-DRB1*08:01L HLA-DPA1*02:01-B1*13:01L
ATSAALQPEEEQEE

SEQ ID NO: 22462 - protein, 13 aa, Severe acute respiratory syndrome coronavirus 2
  REGION 1..13: note = Table B: HLA-DRB1*08:01L
SKPSVEQRKQDDK

SEQ ID NO: 22463 - protein, 13 aa, Severe acute respiratory syndrome coronavirus 2
  REGION 1..13: note = Table B: HLA-DRB1*08:01L
MLAKALRKVPTDN

SEQ ID NO: 22464 - protein, 15 aa, Severe acute respiratory syndrome coronavirus 2
  REGION 1..15: note = Table B: HLA-DRB1*08:01L HLA-DPA1*01:02-B1*04:01L HLA-DRB1*04:08L
VVDYGARFYFYTSKT

SEQ ID NO: 22465 - protein, 12 aa, Severe acute respiratory syndrome coronavirus 2
  REGION 1..12: note = Table B: HLA-DRB1*08:01L
RFYFYTSKTTVA

SEQ ID NO: 22466 - protein, 14 aa, Severe acute respiratory syndrome coronavirus 2
  REGION 1..14: note = Table B: HLA-DRB1*08:01L HLA-DRB3*01:01L HLA-DRB1*04:08L
THGLNLEEAARYMR

SEQ ID NO: 22467 - protein, 11 aa, Severe acute respiratory syndrome coronavirus 2
  REGION 1..11: note = Table B: HLA-DRB1*08:01L
GYLTSSSKTPE

SEQ ID NO: 22468 - protein, 11 aa, Severe acute respiratory syndrome coronavirus 2
  REGION 1..11: note = Table B: HLA-DRB1*08:01L
GIEFLKRGDKS

SEQ ID NO: 22469 - protein, 12 aa, Severe acute respiratory syndrome coronavirus 2
  REGION 1..12: note = Table B: HLA-DRB1*08:01L HLA-DRB4*01:01L HLA-DRB1*09:01L HLA-DRB1*12:02L HLA-DRB3*01:01L HLA-DRB1*07:01L HLA-DRB1*08:03L
NLHTQVVDMSMT

SEQ ID NO: 22470 - protein, 13 aa, Severe acute respiratory syndrome coronavirus 2
  REGION 1..13: note = Table B: HLA-DRB1*08:01L HLA-DRB1*15:03L
LNHTKKWKYPQVN

SEQ ID NO: 22471 - protein, 13 aa, Severe acute respiratory syndrome coronavirus 2
  REGION 1..13: note = Table B: HLA-DRB1*08:01L
LQDAYYRARAGEA

SEQ ID NO: 22472 - protein, 12 aa, Severe acute respiratory syndrome coronavirus 2
  REGION 1..12: note = Table B: HLA-DRB1*08:01L HLA-DPA1*01:03-B1*04:02L HLA-DRB1*12:01L HLA-DRB1*15:03L
LFQHANLDSCKR

SEQ ID NO: 22473 - protein, 10 aa, Severe acute respiratory syndrome coronavirus 2
  REGION 1..10: note = Table B: HLA-DRB1*08:01L HLA-DPA1*01:02-B1*04:01L
SYEQFKKGVQ

SEQ ID NO: 22474 - protein, 13 aa, Severe acute respiratory syndrome coronavirus 2
  REGION 1..13: note = Table B: HLA-DRB1*08:01L HLA-DQA1*05:05-B1*03:19L HLA-DPA1*03:01-B1*105:01L HLA-DQA1*05:05-B1*03:01L HLA-DQA1*01:03-B1*06:01L HLA-DQA1*02:01-B1*03:03L
HGTFTCASEYTGN

SEQ ID NO: 22475 - protein, 15 aa, Severe acute respiratory syndrome coronavirus 2
  REGION 1..15: note = Table B: HLA-DRB1*08:01L HLA-DRB1*04:08L
DGALLTKSSEYKGPI

SEQ ID NO: 22476 - protein, 12 aa, Severe acute respiratory syndrome coronavirus 2
  REGION 1..12: note = Table B: HLA-DRB1*08:01L HLA-DQA1*03:01-B1*03:02L
DPKLDNYYKKDN

SEQ ID NO: 22477 - protein, 13 aa, Severe acute respiratory syndrome coronavirus 2
  REGION 1..13: note = Table B: HLA-DRB1*08:01L
HKPIVWHVNNATN

SEQ ID NO: 22478 - protein, 11 aa, Severe acute respiratory syndrome coronavirus 2
  REGION 1..11: note = Table B: HLA-DRB1*08:01L
TTEVVGDIILK

SEQ ID NO: 22479 - protein, 11 aa, Severe acute respiratory syndrome coronavirus 2
  REGION 1..11: note = Table B: HLA-DRB1*08:01L HLA-DPA1*01:03-B1*04:01L HLA-DRB1*04:10L HLA-DRB1*09:01L
AYVDNSSLTIK

SEQ ID NO: 22480 - protein, 12 aa, Severe acute respiratory syndrome coronavirus 2
  REGION 1..12: note = Table B: HLA-DRB1*08:01L HLA-DQA1*01:03-B1*06:01L HLA-DRB1*15:03L
RVLGLKTLATHG

SEQ ID NO: 22481 - protein, 13 aa, Severe acute respiratory syndrome coronavirus 2
  REGION 1..13: note = Table B: HLA-DRB1*08:01L
AKPFLNKVVSTTT

SEQ ID NO: 22482 - protein, 10 aa, Severe acute respiratory syndrome coronavirus 2
  REGION 1..10: note = Table B: HLA-DRB1*08:01L
WKSYVHVVDG

SEQ ID NO: 22483 - protein, 14 aa, Severe acute respiratory syndrome coronavirus 2
  REGION 1..14: note = Table B: HLA-DRB1*08:01L
ARDLSLQFKRPINP

SEQ ID NO: 22484 - protein, 16 aa, Severe acute respiratory syndrome coronavirus 2
  REGION 1..16: note = Table B: HLA-DRB1*08:01L HLA-DPA1*01:03-B1*104:01L
NPTDQSSYIVDSVTVK

SEQ ID NO: 22485 - protein, 12 aa, Severe acute respiratory syndrome coronavirus 2
  REGION 1..12: note = Table B: HLA-DRB1*08:01L
FDKAGQKTYERH

SEQ ID NO: 22486 - protein, 11 aa, Severe acute respiratory syndrome coronavirus 2
  REGION 1..11: note = Table B: HLA-DRB1*08:01L
HFVNLDNLRAN

SEQ ID NO: 22487 - protein, 13 aa, Severe acute respiratory syndrome coronavirus 2
  REGION 1..13: note = Table B: HLA-DRB1*08:01L
FVNLDNLRANNTK

SEQ ID NO: 22488 - protein, 11 aa, Severe acute respiratory syndrome coronavirus 2
  REGION 1..11: note = Table B: HLA-DRB1*08:01L
LSTFISAARQG

SEQ ID NO: 22489 - protein, 14 aa, Severe acute respiratory syndrome coronavirus 2
  REGION 1..14: note = Table B: HLA-DRB1*08:01L HLA-DPA1*01:02-B1*04:01L
AARQGFVDSDVETK

SEQ ID NO: 22490 - protein, 14 aa, Severe acute respiratory syndrome coronavirus 2
  REGION 1..14: note = Table B: HLA-DRB1*08:01L HLA-DQA1*05:05-B1*03:01L
DSDVETKDVVECLK

SEQ ID NO: 22491 - protein, 12 aa, Severe acute respiratory syndrome coronavirus 2
  REGION 1..12: note = Table B: HLA-DRB1*08:01L HLA-DRB1*15:03L
RHINAQVAKSHN

SEQ ID NO: 22492 - protein, 12 aa, Severe acute respiratory syndrome coronavirus 2
  REGION 1..12: note = Table B: HLA-DRB1*08:01L
INAQVAKSHNIA

SEQ ID NO: 22493 - protein, 13 aa, Severe acute respiratory syndrome coronavirus 2
  REGION 1..13: note = Table B: HLA-DRB1*08:01L
IALKGGKIVNNWL

SEQ ID NO: 22494 - protein, 14 aa, Severe acute respiratory syndrome coronavirus 2
  REGION 1..14: note = Table B: HLA-DRB1*08:01L HLA-DRB1*11:01L HLA-DRB3*01:01L
IFYLITPVHVMSKH

SEQ ID NO: 22495 - protein, 12 aa, Severe acute respiratory syndrome coronavirus 2
  REGION 1..12: note = Table B: HLA-DRB1*08:01L
TCFANKHADFDT

SEQ ID NO: 22496 - protein, 14 aa, Severe acute respiratory syndrome coronavirus 2
  REGION 1..14: note = Table B: HLA-DRB1*08:01L
ADFDTWFSQRGGSY

SEQ ID NO: 22497 - protein, 14 aa, Severe acute respiratory syndrome coronavirus 2
  REGION 1..14: note = Table B: HLA-DRB1*08:01L HLA-DRB1*13:01L HLA-DRB1*09:01L HLA-DRB1*08:02L
RYVLMDGSIIQFPN

SEQ ID NO: 22498 - protein, 14 aa, Severe acute respiratory syndrome coronavirus 2
  REGION 1..14: note = Table B: HLA-DRB1*08:01L HLA-DRB3*01:01L HLA-DRB1*15:01L
VRVVTTFDSEYCRH

SEQ ID NO: 22499 - protein, 13 aa, Severe acute respiratory syndrome coronavirus 2
  REGION 1..13: note = Table B: HLA-DRB1*08:01L
YFMRFRRAFGEYS

SEQ ID NO: 22500 - protein, 12 aa, Severe acute respiratory syndrome coronavirus 2
  REGION 1..12: note = Table B: HLA-DRB1*08:01L
SNYLKRRVVFNG

SEQ ID NO: 22501 - protein, 13 aa, Severe acute respiratory syndrome coronavirus 2
  REGION 1..13: note = Table B: HLA-DRB1*08:01L HLA-DPA1*01:03-B1*02:01L HLA-DPA1*01:03-B1*104:01L
VVFNGVSFSTFEE

SEQ ID NO: 22502 - protein, 13 aa, Severe acute respiratory syndrome coronavirus 2
  REGION 1..13: note = Table B: HLA-DRB1*08:01L
NKEMYLKLRSDVL

SEQ ID NO: 22503 - protein, 14 aa, Severe acute respiratory syndrome coronavirus 2
  REGION 1..14: note = Table B: HLA-DRB1*08:01L
PLTQYNRYLALYNK

SEQ ID NO: 22504 - protein, 12 aa, Severe acute respiratory syndrome coronavirus 2
  REGION 1..12: note = Table B: HLA-DRB1*08:01L HLA-DRB1*04:08L
QSGFRKMAFPSG

SEQ ID NO: 22505 - protein, 14 aa, Severe acute respiratory syndrome coronavirus 2
  REGION 1..14: note = Table B: HLA-DRB1*08:01L HLA-DRB1*12:01L HLA-DPA1*01:02-B1*04:01L HLA-DRB1*15:03L
LRVIGHSMQNCVLK

SEQ ID NO: 22506 - protein, 11 aa, Severe acute respiratory syndrome coronavirus 2
  REGION 1..11: note = Table B: HLA-DRB1*08:01L HLA-DQA1*01-B1*05L HLA-DQA1*03:01-B1*03:02L
RPNFTIKGSFL

SEQ ID NO: 22507 - protein, 14 aa, Severe acute respiratory syndrome coronavirus 2
  REGION 1..14: note = Table B: HLA-DRB1*08:01L HLA-DPA1*03:01-B1*105:01L
VSFCYMHHMELPTG

SEQ ID NO: 22508 - protein, 13 aa, Severe acute respiratory syndrome coronavirus 2
  REGION 1..13: note = Table B: HLA-DRB1*08:01L HLA-DPA1*01:03-B1*04:02L
VDRQTAQAAGTDT

SEQ ID NO: 22509 - protein, 12 aa, Severe acute respiratory syndrome coronavirus 2
  REGION 1..12: note = Table B: HLA-DRB1*08:01L HLA-DRB1*12:01L
DRWFLNRFTTTL

SEQ ID NO: 22510 - protein, 11 aa, Severe acute respiratory syndrome coronavirus 2
  REGION 1..11: note = Table B: HLA-DRB1*08:01L
KYNYEPLTQDH

SEQ ID NO: 22511 - protein, 11 aa, Severe acute respiratory syndrome coronavirus 2
  REGION 1..11: note = Table B: HLA-DRB1*08:01L
TFQSAVKRTIK

SEQ ID NO: 22512 - protein, 13 aa, Severe acute respiratory syndrome coronavirus 2
  REGION 1..13: note = Table B: HLA-DRB1*08:01L
FRYMNSQGLLPPK

SEQ ID NO: 22513 - protein, 15 aa, Severe acute respiratory syndrome coronavirus 2
  REGION 1..15: note = Table B: HLA-DRB1*08:01L HLA-DQA1*05:05-B1*03:19L
VQLHNDILLAKDTTE

SEQ ID NO: 22514 - protein, 12 aa, Severe acute respiratory syndrome coronavirus 2
  REGION 1..12: note = Table B: HLA-DRB1*08:01L
GDSEVVLKKLKK

SEQ ID NO: 22515 - protein, 12 aa, Severe acute respiratory syndrome coronavirus 2
  REGION 1..12: note = Table B: HLA-DRB1*08:01L
VLKKLKKSLNVA

SEQ ID NO: 22516 - protein, 13 aa, Severe acute respiratory syndrome coronavirus 2
  REGION 1..13: note = Table B: HLA-DRB1*08:01L
AAMQRKLEKMADQ

SEQ ID NO: 22517 - protein, 14 aa, Severe acute respiratory syndrome coronavirus 2
  REGION 1..14: note = Table B: HLA-DRB1*08:01L HLA-DRB1*04:08L
RSEDKRAKVTSAMQ

SEQ ID NO: 22518 - protein, 10 aa, Severe acute respiratory syndrome coronavirus 2
  REGION 1..10: note = Table B: HLA-DRB1*08:01L
FTMLRKLDND

SEQ ID NO: 22519 - protein, 14 aa, Severe acute respiratory syndrome coronavirus 2
  REGION 1..14: note = Table B: HLA-DRB1*08:01L HLA-DRB4*01:01L HLA-DPA1*01:03-B1*104:01L HLA-DRB1*10:01L HLA-DRB1*08:03L
ADSKIVQLSEISMD

SEQ ID NO: 22520 - protein, 14 aa, Severe acute respiratory syndrome coronavirus 2
  REGION 1..14: note = Table B: HLA-DRB1*08:01L HLA-DRB5*01:01L HLA-DRB4*02:01NL HLA-DPA1*01:03-B1*04:02L HLA-DPA1*01:03-B1*02:01L HLA-DRB1*08:02L
VTALRANSAVKLQN

SEQ ID NO: 22521 - protein, 12 aa, Severe acute respiratory syndrome coronavirus 2
  REGION 1..12: note = Table B: HLA-DRB1*08:01L HLA-DRB1*04:08L
KWARFPKSDGTG

SEQ ID NO: 22522 - protein, 11 aa, Severe acute respiratory syndrome coronavirus 2
  REGION 1..11: note = Table B: HLA-DRB1*08:01L HLA-DRB1*12:01L HLA-DRB1*14:17L
VTDTPKGPKVK

SEQ ID NO: 22523 - protein, 13 aa, Severe acute respiratory syndrome coronavirus 2
  REGION 1..13: note = Table B: HLA-DRB1*08:01L HLA-DRB1*11:01L
AYKDYLASGGQPI

SEQ ID NO: 22524 - protein, 14 aa, Severe acute respiratory syndrome coronavirus 2
  REGION 1..14: note = Table B: HLA-DRB1*08:01L HLA-DPA1*01:03-B1*04:02L
TGTGQAITVTPEAN

SEQ ID NO: 22525 - protein, 13 aa, Severe acute respiratory syndrome coronavirus 2
  REGION 1..13: note = Table B: HLA-DRB1*08:01L
NDKVAGFAKFLKT

SEQ ID NO: 22526 - protein, 15 aa, Severe acute respiratory syndrome coronavirus 2
  REGION 1..15: note = Table B: HLA-DRB1*08:01L
LKTNCCRFQEKDEDD

SEQ ID NO: 22527 - protein, 13 aa, Severe acute respiratory syndrome coronavirus 2
  REGION 1..13: note = Table B: HLA-DRB1*08:01L
NCCRFQEKDEDDN

SEQ ID NO: 22528 - protein, 11 aa, Severe acute respiratory syndrome coronavirus 2
  REGION 1..11: note = Table B: HLA-DRB1*08:01L
SYFVVKRHTFS

SEQ ID NO: 22529 - protein, 11 aa, Severe acute respiratory syndrome coronavirus 2
  REGION 1..11: note = Table B: HLA-DRB1*08:01L
YFVVKRHTFSN

SEQ ID NO: 22530 - protein, 14 aa, Severe acute respiratory syndrome coronavirus 2
  REGION 1..14: note = Table B: HLA-DRB1*08:01L HLA-DPA1*02:01-B1*13:01L
LKDCPAVAKHDFFK

SEQ ID NO: 22531 - protein, 14 aa, Severe acute respiratory syndrome coronavirus 2
  REGION 1..14: note = Table B: HLA-DRB1*08:01L HLA-DPA1*02:01-B1*13:01L
AKHDFFKFRIDGDM

SEQ ID NO: 22532 - protein, 11 aa, Severe acute respiratory syndrome coronavirus 2
  REGION 1..11: note = Table B: HLA-DRB1*08:01L
DLVYALRHFDE

SEQ ID NO: 22533 - protein, 11 aa, Severe acute respiratory syndrome coronavirus 2
  REGION 1..11: note = Table B: HLA-DRB1*08:01L
LVYALRHFDEG

SEQ ID NO: 22534 - protein, 15 aa, Severe acute respiratory syndrome coronavirus 2
  REGION 1..15: note = Table B: HLA-DRB1*08:01L
AGIVGVLTLDNQDLN

SEQ ID NO: 22535 - protein, 14 aa, Severe acute respiratory syndrome coronavirus 2
  REGION 1..14: note = Table B: HLA-DRB1*08:01L
IVGVLTLDNQDLNG

SEQ ID NO: 22536 - protein, 14 aa, Severe acute respiratory syndrome coronavirus 2
  REGION 1..14: note = Table B: HLA-DRB1*08:01L HLA-DRB1*11:01L
TTPGSGVPVVDSYY

SEQ ID NO: 22537 - protein, 12 aa, Severe acute respiratory syndrome coronavirus 2
  REGION 1..12: note = Table B: HLA-DRB1*08:01L HLA-DQA1*01-B1*05L HLA-DPA1*03:01-B1*105:01L HLA-DPA1*01:02-B1*04:01L HLA-DRB1*16:01L
WDLLKYDFTEER

SEQ ID NO: 22538 - protein, 13 aa, Severe acute respiratory syndrome coronavirus 2
  REGION 1..13: note = Table B: HLA-DRB1*08:01L HLA-DRB1*04:08L
YDFTEERLKLFDR

SEQ ID NO: 22539 - protein, 12 aa, Severe acute respiratory syndrome coronavirus 2
  REGION 1..12: note = Table B: HLA-DRB1*08:01L
EERLKLFDRYFK

SEQ ID NO: 22540 - protein, 12 aa, Severe acute respiratory syndrome coronavirus 2
  REGION 1..12: note = Table B: HLA-DRB1*08:01L
KLFDRYFKYWDQ

SEQ ID NO: 22541 - protein, 13 aa, Severe acute respiratory syndrome coronavirus 2
  REGION 1..13: note = Table B: HLA-DRB1*08:01L
KYWDQTYHPNCVN

SEQ ID NO: 22542 - protein, 11 aa, Severe acute respiratory syndrome coronavirus 2
  REGION 1..11: note = Table B: HLA-DRB1*08:01L HLA-DRB1*16:01L HLA-DRB1*04:08L
GYHFRELGVVH

SEQ ID NO: 22543 - protein, 13 aa, Severe acute respiratory syndrome coronavirus 2
  REGION 1..13: note = Table B: HLA-DRB1*08:01L
VVHNQDVNLHSSR

SEQ ID NO: 22544 - protein, 14 aa, Severe acute respiratory syndrome coronavirus 2
  REGION 1..14: note = Table B: HLA-DRB1*08:01L HLA-DPA1*02:01-B1*13:01L
VELKHFFFAQDGNA

SEQ ID NO: 22545 - protein, 14 aa, Severe acute respiratory syndrome coronavirus 2
  REGION 1..14: note = Table B: HLA-DRB1*08:01L HLA-DRB1*13:01L HLA-DRB1*07:01L
FFAQDGNAAISDYD

SEQ ID NO: 22546 - protein, 13 aa, Severe acute respiratory syndrome coronavirus 2
  REGION 1..13: note = Table B: HLA-DRB1*08:01L HLA-DRB1*11:01L HLA-DPA1*01:03-B1*04:02L HLA-DRB3*01:01L HLA-DPA1*02:01-B1*13:01L HLA-DQA1*01:03-B1*06:01L
IVNNLDKSAGFPF

SEQ ID NO: 22547 - protein, 14 aa, Severe acute respiratory syndrome coronavirus 2
  REGION 1..14: note = Table B: HLA-DRB1*08:01L
NLDKSAGFPFNKWG

SEQ ID NO: 22548 - protein, 14 aa, Severe acute respiratory syndrome coronavirus 2
  REGION 1..14: note = Table B: HLA-DRB1*08:01L
NKWGKARLYYDSMS

SEQ ID NO: 22549 - protein, 16 aa, Severe acute respiratory syndrome coronavirus 2
  REGION 1..16: note = Table B: HLA-DRB1*08:01L HLA-DRB1*09:01L HLA-DRB1*07:01L HLA-DRB1*08:02L HLA-DRB1*08:03L
DSMSYEDQDALFAYTK

SEQ ID NO: 22550 - protein, 14 aa, Severe acute respiratory syndrome coronavirus 2
  REGION 1..14: note = Table B: HLA-DRB1*08:01L HLA-DRB1*12:01L HLA-DRB1*16:01L HLA-DRB1*15:03L
DQDALFAYTKRNVI

SEQ ID NO: 22551 - protein, 13 aa, Severe acute respiratory syndrome coronavirus 2
  REGION 1..13: note = Table B: HLA-DRB1*08:01L
ITQMNLKYAISAK

SEQ ID NO: 22552 - protein, 13 aa, Severe acute respiratory syndrome coronavirus 2
  REGION 1..13: note = Table B: HLA-DRB1*08:01L
RQFHQKLLKSIAA

SEQ ID NO: 22553 - protein, 13 aa, Severe acute respiratory syndrome coronavirus 2
  REGION 1..13: note = Table B: HLA-DRB1*08:01L
ATVVIGTSKFYGG

SEQ ID NO: 22554 - protein, 15 aa, Severe acute respiratory syndrome coronavirus 2
  REGION 1..15: note = Table B: HLA-DRB1*08:01L HLA-DRB1*15:03L
VRNLQHRLYECLYRN

SEQ ID NO: 22555 - protein, 11 aa, Severe acute respiratory syndrome coronavirus 2
  REGION 1..11: note = Table B: HLA-DRB1*08:01L
RLYECLYRNRD

SEQ ID NO: 22556 - protein, 11 aa, Severe acute respiratory syndrome coronavirus 2
  REGION 1..11: note = Table B: HLA-DRB1*08:01L
YECLYRNRDVD

SEQ ID NO: 22557 - protein, 14 aa, Severe acute respiratory syndrome coronavirus 2
  REGION 1..14: note = Table B: HLA-DRB1*08:01L
ECLYRNRDVDTDFV

SEQ ID NO: 22558 - protein, 10 aa, Severe acute respiratory syndrome coronavirus 2
  REGION 1..10: note = Table B: HLA-DRB1*08:01L HLA-DPA1*01:02-B1*04:01L
FYAYLRKHFS

SEQ ID NO: 22559 - protein, 11 aa, Severe acute respiratory syndrome coronavirus 2
  REGION 1..11: note = Table B: HLA-DRB1*08:01L
MSYYCKSHKPP

SEQ ID NO: 22560 - protein, 12 aa, Severe acute respiratory syndrome coronavirus 2
  REGION 1..12: note = Table B: HLA-DRB1*08:01L HLA-DRB1*12:01L HLA-DRB1*04:08L HLA-DRB1*15:03L
HLSWEVGKPRPP

SEQ ID NO: 22561 - protein, 13 aa, Severe acute respiratory syndrome coronavirus 2
  REGION 1..13: note = Table B: HLA-DRB1*08:01L HLA-DPA1*03:01-B1*105:01L
LSWEVGKPRPPLN

SEQ ID NO: 22562 - protein, 14 aa, Severe acute respiratory syndrome coronavirus 2
  REGION 1..14: note = Table B: HLA-DRB1*08:01L
AQCFKMFYKGVITH

SEQ ID NO: 22563 - protein, 13 aa, Severe acute respiratory syndrome coronavirus 2
  REGION 1..13: note = Table B: HLA-DRB1*08:01L HLA-DRB1*12:01L HLA-DRB1*04:08L
DRDLYDKLQFTSL

SEQ ID NO: 22564 - protein, 14 aa, Severe acute respiratory syndrome coronavirus 2
  REGION 1..14: note = Table B: HLA-DRB1*08:01L HLA-DRB3*01:01L HLA-DRB1*07:01L
KVITGLHPTQAPTH

SEQ ID NO: 22565 - protein, 12 aa, Severe acute respiratory syndrome coronavirus 2
  REGION 1..12: note = Table B: HLA-DRB1*08:01L
SRVSAKPPPGDQ

SEQ ID NO: 22566 - protein, 14 aa, Severe acute respiratory syndrome coronavirus 2
  REGION 1..14: note = Table B: HLA-DRB1*08:01L HLA-DPA1*01:03-B1*04:02L
KHLIPLMYKGLPWN

SEQ ID NO: 22567 - protein, 13 aa, Severe acute respiratory syndrome coronavirus 2
  REGION 1..13: note = Table B: HLA-DRB1*08:01L
RIKIVQMLSDTLK

SEQ ID NO: 22568 - protein, 13 aa, Severe acute respiratory syndrome coronavirus 2
  REGION 1..13: note = Table B: HLA-DRB1*08:01L HLA-DQA1*05:05-B1*03:01L
VLWAHGFELTSMK

SEQ ID NO: 22569 - protein, 11 aa, Severe acute respiratory syndrome coronavirus 2
  REGION 1..11: note = Table B: HLA-DRB1*08:01L
KINAACRKVQH

SEQ ID NO: 22570 - protein, 16 aa, Severe acute respiratory syndrome coronavirus 2
  REGION 1..16: note = Table B: HLA-DRB1*08:01L HLA-DRB1*04:08L
VDRYPANSIVCRFDTR

SEQ ID NO: 22571 - protein, 14 aa, Severe acute respiratory syndrome coronavirus 2
  REGION 1..14: note = Table B: HLA-DRB1*08:01L
RFDTRVLSNLNLPG

SEQ ID NO: 22572 - protein, 14 aa, Severe acute respiratory syndrome coronavirus 2
  REGION 1..14: note = Table B: HLA-DRB1*08:01L HLA-DQA1*05:05-B1*03:01L
FYYSDSPCESHGKQ

SEQ ID NO: 22573 - protein, 13 aa, Severe acute respiratory syndrome coronavirus 2
  REGION 1..13: note = Table B: HLA-DRB1*08:01L HLA-DRB1*16:01L HLA-DRB1*04:08L
FELWAKRNIKPVP

SEQ ID NO: 22574 - protein, 15 aa, Severe acute respiratory syndrome coronavirus 2
  REGION 1..15: note = Table B: HLA-DRB1*08:01L
IGVCSMTDIAKKPTE

SEQ ID NO: 22575 - protein, 14 aa, Severe acute respiratory syndrome coronavirus 2
  REGION 1..14: note = Table B: HLA-DRB1*08:01L
IGEAVKTQFNYYKK

SEQ ID NO: 22576 - protein, 14 aa, Severe acute respiratory syndrome coronavirus 2
  REGION 1..14: note = Table B: HLA-DRB1*08:01L
EAVKTQFNYYKKVD

SEQ ID NO: 22577 - protein, 10 aa, Severe acute respiratory syndrome coronavirus 2
  REGION 1..10: note = Table B: HLA-DRB1*08:01L
QFNYYKKVDG

SEQ ID NO: 22578 - protein, 12 aa, Severe acute respiratory syndrome coronavirus 2
  REGION 1..12: note = Table B: HLA-DRB1*08:01L HLA-DQA1*03:01-B1*03:02L
QEFKPRSQMEID

SEQ ID NO: 22579 - protein, 10 aa, Severe acute respiratory syndrome coronavirus 2
  REGION 1..10: note = Table B: HLA-DRB1*08:01L
EFIERYKLEG

SEQ ID NO: 22580 - protein, 12 aa, Severe acute respiratory syndrome coronavirus 2
  REGION 1..12: note = Table B: HLA-DRB1*08:01L HLA-DRB1*04:08L
ERYKLEGYAFEH

SEQ ID NO: 22581 - protein, 13 aa, Severe acute respiratory syndrome coronavirus 2
  REGION 1..13: note = Table B: HLA-DRB1*08:01L HLA-DRB1*16:01L
LHLLIGLAKRFKE

SEQ ID NO: 22582 - protein, 13 aa, Severe acute respiratory syndrome coronavirus 2
  REGION 1..13: note = Table B: HLA-DRB1*08:01L
KVVKVTIDYTEIS

SEQ ID NO: 22583 - protein, 15 aa, Severe acute respiratory syndrome coronavirus 2
  REGION 1..15: note = Table B: HLA-DRB1*08:01L HLA-DPA1*01:03-B1*04:02L HLA-DPA1*01:03-B1*104:01L
YPKLQSSQAWQPGVA

SEQ ID NO: 22584 - protein, 15 aa, Severe acute respiratory syndrome coronavirus 2
  REGION 1..15: note = Table B: HLA-DRB1*08:01L
STLIGDCATVHTANK

SEQ ID NO: 22585 - protein, 13 aa, Severe acute respiratory syndrome coronavirus 2
  REGION 1..13: note = Table B: HLA-DRB1*08:01L HLA-DPA1*01:03-B1*02:01L
EHSWNADLYKLMG

SEQ ID NO: 22586 - protein, 13 aa, Severe acute respiratory syndrome coronavirus 2
  REGION 1..13: note = Table B: HLA-DRB1*08:01L
AFLIGCNYLGKPR

SEQ ID NO: 22587 - protein, 13 aa, Severe acute respiratory syndrome coronavirus 2
  REGION 1..13: note = Table B: HLA-DRB1*08:01L
LIGCNYLGKPREQ

SEQ ID NO: 22588 - protein, 14 aa, Severe acute respiratory syndrome coronavirus 2
  REGION 1..14: note = Table B: HLA-DRB1*08:01L
IGCNYLGKPREQID

SEQ ID NO: 22589 - protein, 10 aa, Severe acute respiratory syndrome coronavirus 2
  REGION 1..10: note = Table B: HLA-DRB1*08:01L HLA-DQA1*03:01-B1*03:02L
DMSKFPLKLR

SEQ ID NO: 22590 - protein, 11 aa, Severe acute respiratory syndrome coronavirus 2
  REGION 1..11: note = Table B: HLA-DRB1*08:01L HLA-DRB3*01:01L
SLLSKGRLIIR

SEQ ID NO: 22591 - protein, 12 aa, Severe acute respiratory syndrome coronavirus 2
  REGION 1..12: note = Table B: HLA-DRB1*08:01L HLA-DRB3*01:01L
RVVISSDVLVNN

SEQ ID NO: 22592 - protein, 13 aa, Severe acute respiratory syndrome coronavirus 2
  REGION 1..13: note = Table B: HLA-DRB1*08:01L
KRFDNPVLPFNDG

SEQ ID NO: 22593 - protein, 15 aa, Severe acute respiratory syndrome coronavirus 2
  REGION 1..15: note = Table B: HLA-DRB1*08:01L
EFQFCNDPFLGVYYH

SEQ ID NO: 22594 - protein, 12 aa, Severe acute respiratory syndrome coronavirus 2
  REGION 1..12: note = Table B: HLA-DRB1*08:01L HLA-DRB1*04:08L
VYYHKNNKSWME

SEQ ID NO: 22595 - protein, 12 aa, Severe acute respiratory syndrome coronavirus 2
  REGION 1..12: note = Table B: HLA-DRB1*08:01L HLA-DRB1*12:01L HLA-DRB1*04:08L
KSWMESEFRVYS

SEQ ID NO: 22596 - protein, 13 aa, Severe acute respiratory syndrome coronavirus 2
  REGION 1..13: note = Table B: HLA-DRB1*08:01L HLA-DQA1*03:01-B1*03:02L HLA-DPA1*01:02-B1*04:01L HLA-DRB1*16:01L HLA-DQA1*01:03-B1*06:01L
LQPRTFLLKYNEN

SEQ ID NO: 22597 - protein, 12 aa, Severe acute respiratory syndrome coronavirus 2
  REGION 1..12: note = Table B: HLA-DRB1*08:01L
PRTFLLKYNENG

SEQ ID NO: 22598 - protein, 14 aa, Severe acute respiratory syndrome coronavirus 2
  REGION 1..14: note = Table B: HLA-DRB1*08:01L
ETKCTLKSFTVEKG

SEQ ID NO: 22599 - protein, 11 aa, Severe acute respiratory syndrome coronavirus 2
  REGION 1..11: note = Table B: HLA-DRB1*08:01L
GNYNYLYRLFR

SEQ ID NO: 22600 - protein, 12 aa, Severe acute respiratory syndrome coronavirus 2
  REGION 1..12: note = Table B: HLA-DRB1*08:01L
YLYRLFRKSNLK

SEQ ID NO: 22601 - protein, 12 aa, Severe acute respiratory syndrome coronavirus 2
  REGION 1..12: note = Table B: HLA-DRB1*08:01L
LFRKSNLKPFER

SEQ ID NO: 22602 - protein, 13 aa, Severe acute respiratory syndrome coronavirus 2
  REGION 1..13: note = Table B: HLA-DRB1*08:01L
RKSNLKPFERDIS

SEQ ID NO: 22603 - protein, 12 aa, Severe acute respiratory syndrome coronavirus 2
  REGION 1..12: note = Table B: HLA-DRB1*08:01L HLA-DRB4*02:01NL HLA-DRB1*16:01L HLA-DRB1*04:08L
TGTGVLTESNKK

SEQ ID NO: 22604 - protein, 11 aa, Severe acute respiratory syndrome coronavirus 2
  REGION 1..11: note = Table B: HLA-DRB1*08:01L
QTQTNSPRRAR

SEQ ID NO: 22605 - protein, 14 aa, Severe acute respiratory syndrome coronavirus 2
  REGION 1..14: note = Table B: HLA-DRB1*08:01L
TGIAVEQDKNTQEV

SEQ ID NO: 22606 - protein, 13 aa, Severe acute respiratory syndrome coronavirus 2
  REGION 1..13: note = Table B: HLA-DRB1*08:01L
KQIYKTPPIKDFG

SEQ ID NO: 22607 - protein, 14 aa, Severe acute respiratory syndrome coronavirus 2
  REGION 1..14: note = Table B: HLA-DRB1*08:01L HLA-DPA1*01:03-B1*02:01L
KVTLADAGFIKQYG

SEQ ID NO: 22608 - protein, 14 aa, Severe acute respiratory syndrome coronavirus 2
  REGION 1..14: note = Table B: HLA-DRB1*08:01L
WTFGAGAALQIPFA

SEQ ID NO: 22609 - protein, 13 aa, Severe acute respiratory syndrome coronavirus 2
  REGION 1..13: note = Table B: HLA-DRB1*08:01L HLA-DRB1*16:01L HLA-DRB1*15:03L
VLNDILSRLDKVE

SEQ ID NO: 22610 - protein, 12 aa, Severe acute respiratory syndrome coronavirus 2
  REGION 1..12: note = Table B: HLA-DRB1*08:01L
SKRVDFCGKGYH

SEQ ID NO: 22611 - protein, 12 aa, Severe acute respiratory syndrome coronavirus 2
  REGION 1..12: note = Table B: HLA-DRB1*08:01L
HWFVTQRNFYEP

SEQ ID NO: 22612 - protein, 11 aa, Severe acute respiratory syndrome coronavirus 2
  REGION 1..11: note = Table B: HLA-DRB1*08:01L
KEIDRLNEVAK

SEQ ID NO: 22613 - protein, 11 aa, Severe acute respiratory syndrome coronavirus 2
  REGION 1..11: note = Table B: HLA-DRB1*08:01L
RWQLALSKGVH

SEQ ID NO: 22614 - protein, 12 aa, Severe acute respiratory syndrome coronavirus 2
  REGION 1..12: note = Table B: HLA-DRB1*08:01L HLA-DPA1*01:03-B1*04:01L HLA-DRB1*07:01L
NKIVDEPEEHVQ

SEQ ID NO: 22615 - protein, 13 aa, Severe acute respiratory syndrome coronavirus 2
  REGION 1..13: note = Table B: HLA-DRB1*08:01L HLA-DRB1*04:08L
VSLVKPSFYVYSR

SEQ ID NO: 22616 - protein, 13 aa, Severe acute respiratory syndrome coronavirus 2
  REGION 1..13: note = Table B: HLA-DRB1*08:01L
RVKNLNSSRVPDL

SEQ ID NO: 22617 - protein, 11 aa, Severe acute respiratory syndrome coronavirus 2
  REGION 1..11: note = Table B: HLA-DRB1*08:01L
ASFRLFARTRS

SEQ ID NO: 22618 - protein, 11 aa, Severe acute respiratory syndrome coronavirus 2
  REGION 1..11: note = Table B: HLA-DRB1*08:01L
SFRLFARTRSM

SEQ ID NO: 22619 - protein, 14 aa, Severe acute respiratory syndrome coronavirus 2
  REGION 1..14: note = Table B: HLA-DRB1*08:01L
LGRCDIKDLPKEIT

SEQ ID NO: 22620 - protein, 16 aa, Severe acute respiratory syndrome coronavirus 2
  REGION 1..16: note = Table B: HLA-DRB1*08:01L HLA-DPA1*03:01-B1*105:01L HLA-DRB1*15:03L
DIKDLPKEITVATSRT

SEQ ID NO: 22621 - protein, 11 aa, Severe acute respiratory syndrome coronavirus 2
  REGION 1..11: note = Table B: HLA-DRB1*08:01L HLA-DQA1*05:05-B1*03:01L
DSGFAAYSRYR

SEQ ID NO: 22622 - protein, 13 aa, Severe acute respiratory syndrome coronavirus 2
  REGION 1..13: note = Table B: HLA-DRB1*08:01L HLA-DRB1*16:01L HLA-DRB1*04:08L
SRYRIGNYKLNTD

SEQ ID NO: 22623 - protein, 12 aa, Severe acute respiratory syndrome coronavirus 2
  REGION 1..12: note = Table B: HLA-DRB1*08:01L
YHYQECVRGTTV

SEQ ID NO: 22624 - protein, 13 aa, Severe acute respiratory syndrome coronavirus 2
  REGION 1..13: note = Table B: HLA-DRB1*08:01L HLA-DRB1*11:01L HLA-DPA1*01:03-B1*04:01L HLA-DRB1*09:01L HLA-DPA1*01:03-B1*04:02L HLA-DPA1*02:01-B1*13:01L HLA-DRB1*07:01L HLA-DRB1*08:03L
SGTYEGNSPFHPL

SEQ ID NO: 22625 - protein, 15 aa, Severe acute respiratory syndrome coronavirus 2
  REGION 1..15: note = Table B: HLA-DRB1*08:01L
TYEGNSPFHPLADNK

SEQ ID NO: 22626 - protein, 12 aa, Severe acute respiratory syndrome coronavirus 2
  REGION 1..12: note = Table B: HLA-DRB1*08:01L
YSKWYIRVGARK

SEQ ID NO: 22627 - protein, 10 aa, Severe acute respiratory syndrome coronavirus 2
  REGION 1..10: note = Table B: HLA-DRB1*08:01L HLA-DQA1*03:01-B1*03:02L HLA-DRB1*16:01L HLA-DQA1*02:01-B1*03:03L
ARKSAPLIEL

SEQ ID NO: 22628 - protein, 11 aa, Severe acute respiratory syndrome coronavirus 2
  REGION 1..11: note = Table B: HLA-DRB1*08:01L HLA-DRB1*10:01L
WFTALTQHGKE

SEQ ID NO: 22629 - protein, 13 aa, Severe acute respiratory syndrome coronavirus 2
  REGION 1..13: note = Table B: HLA-DRB1*08:01L
NQLESKMSGKGQQ

SEQ ID NO: 22630 - protein, 14 aa, Severe acute respiratory syndrome coronavirus 2
  REGION 1..14: note = Table B: HLA-DRB1*08:01L
SKMSGKGQQQQGQT

SEQ ID NO: 22631 - protein, 10 aa, Severe acute respiratory syndrome coronavirus 2
  REGION 1..10: note = Table B: HLA-DRB1*08:01L HLA-DQA1*03:01-B1*03:02L
AEASKKPRQK

SEQ ID NO: 22632 - protein, 15 aa, Severe acute respiratory syndrome coronavirus 2
  REGION 1..15: note = Table B: HLA-DRB1*08:01L HLA-DRB4*01:01L HLA-DRB1*12:02L
SKQLQQSMSSADSTQ

SEQ ID NO: 22633 - protein, 14 aa, Severe acute respiratory syndrome coronavirus 2
  REGION 1..14: note = Table B: HLA-DRB1*11:01L HLA-DPA1*02:01-B1*13:01L
SLPVLQVRDVLVRG

SEQ ID NO: 22634 - protein, 14 aa, Severe acute respiratory syndrome coronavirus 2
  REGION 1..14: note = Table B: HLA-DRB1*11:01L
QENWNTKHSSGVTR

SEQ ID NO: 22635 - protein, 15 aa, Severe acute respiratory syndrome coronavirus 2
  REGION 1..15: note = Table B: HLA-DRB1*11:01L HLA-DQA1*03:01-B1*03:02L
DTKRGVYCCREHEHE

SEQ ID NO: 22636 - protein, 15 aa, Severe acute respiratory syndrome coronavirus 2
  REGION 1..15: note = Table B: HLA-DRB1*11:01L HLA-DRB1*15:03L
WVPRASANIGCNHTG

SEQ ID NO: 22637 - protein, 14 aa, Severe acute respiratory syndrome coronavirus 2
  REGION 1..14: note = Table B: HLA-DRB1*11:01L HLA-DRB3*01:01L HLA-DQA1*03:01-B1*03:02L HLA-DPA1*01:02-B1*04:01L HLA-DRB1*07:01L
ASANIGCNHTGVVG

SEQ ID NO: 22638 - protein, 14 aa, Severe acute respiratory syndrome coronavirus 2
  REGION 1..14: note = Table B: HLA-DRB1*11:01L
FSASTSAFVETVKG

SEQ ID NO: 22639 - protein, 13 aa, Severe acute respiratory syndrome coronavirus 2
  REGION 1..13: note = Table B: HLA-DRB1*11:01L
GTVYEKLKPVLDW

SEQ ID NO: 22640 - protein, 16 aa, Severe acute respiratory syndrome coronavirus 2
  REGION 1..16: note = Table B: HLA-DRB1*11:01L HLA-DPA1*01:03-B1*04:02L HLA-DRB1*07:01L
LKALNLGETFVTHSKG

SEQ ID NO: 22641 - protein, 13 aa, Severe acute respiratory syndrome coronavirus 2
  REGION 1..13: note = Table B: HLA-DRB1*11:01L HLA-DRB1*04:08L
LYRKCVKSREETG

SEQ ID NO: 22642 - protein, 16 aa, Severe acute respiratory syndrome coronavirus 2
  REGION 1..16: note = Table B: HLA-DRB1*11:01L
TQYEYGTEDDYQGKPL

SEQ ID NO: 22643 - protein, 14 aa, Severe acute respiratory syndrome coronavirus 2
  REGION 1..14: note = Table B: HLA-DRB1*11:01L HLA-DRB1*08:03L
GTEDDYQGKPLEFG

SEQ ID NO: 22644 - protein, 14 aa, Severe acute respiratory syndrome coronavirus 2
  REGION 1..14: note = Table B: HLA-DRB1*11:01L HLA-DRB1*04:10L HLA-DPA1*01:03-B1*104:01L
GGGVAGALNKATNN

SEQ ID NO: 22645 - protein, 13 aa, Severe acute respiratory syndrome coronavirus 2
  REGION 1..13: note = Table B: HLA-DRB1*11:01L
SAFYILPSIISNE

SEQ ID NO: 22646 - protein, 14 aa, Severe acute respiratory syndrome coronavirus 2
  REGION 1..14: note = Table B: HLA-DRB1*11:01L HLA-DRB1*07:01L
NLREMLAHAEETRK

SEQ ID NO: 22647 - protein, 14 aa, Severe acute respiratory syndrome coronavirus 2
  REGION 1..14: note = Table B: HLA-DRB1*11:01L
QRKYKGIKIQEGVV

SEQ ID NO: 22648 - protein, 17 aa, Severe acute respiratory syndrome coronavirus 2
  REGION 1..17: note = Table B: HLA-DRB1*11:01L
MPLGYVTHGLNLEEAAR

SEQ ID NO: 22649 - protein, 14 aa, Severe acute respiratory syndrome coronavirus 2
  REGION 1..14: note = Table B: HLA-DRB1*11:01L HLA-DRB3*01:01L
KVFTTVDNINLHTQ

SEQ ID NO: 22650 - protein, 15 aa, Severe acute respiratory syndrome coronavirus 2
  REGION 1..15: note = Table B: HLA-DRB1*11:01L HLA-DPA1*01:03-B1*104:01L
LRVEAFEYYHTTDPS

SEQ ID NO: 22651 - protein, 13 aa, Severe acute respiratory syndrome coronavirus 2
  REGION 1..13: note = Table B: HLA-DRB1*11:01L HLA-DRB3*01:01L HLA-DPA1*01:03-B1*02:01L
YLFQHANLDSCKR

SEQ ID NO: 22652 - protein, 15 aa, Severe acute respiratory syndrome coronavirus 2
  REGION 1..15: note = Table B: HLA-DRB1*11:01L HLA-DPA1*02:01-B1*13:01L
SKETLYCIDGALLTK

SEQ ID NO: 22653 - protein, 14 aa, Severe acute respiratory syndrome coronavirus 2
  REGION 1..14: note = Table B: HLA-DRB1*11:01L HLA-DRB3*01:01L HLA-DPA1*01:03-B1*104:01L
VDNSSLTIKKPNEL

SEQ ID NO: 22654 - protein, 12 aa, Severe acute respiratory syndrome coronavirus 2
  REGION 1..12: note = Table B: HLA-DRB1*11:01L HLA-DRB1*04:10L HLA-DRB1*08:03L
FISAARQGFVDS

SEQ ID NO: 22655 - protein, 15 aa, Severe acute respiratory syndrome coronavirus 2
  REGION 1..15: note = Table B: HLA-DRB1*11:01L
IALIWNVKDFMSLSE

SEQ ID NO: 22656 - protein, 15 aa, Severe acute respiratory syndrome coronavirus 2
  REGION 1..15: note = Table B: HLA-DRB1*11:01L HLA-DRB3*01:01L
RQVVNVVTTKIALKG

SEQ ID NO: 22657 - protein, 12 aa, Severe acute respiratory syndrome coronavirus 2
  REGION 1..12: note = Table B: HLA-DRB1*11:01L HLA-DRB1*10:01L HLA-DRB1*15:03L
IGYKAIDGGVTR

SEQ ID NO: 22658 - protein, 14 aa, Severe acute respiratory syndrome coronavirus 2
  REGION 1..14: note = Table B: HLA-DRB1*11:01L
YFMRFRRAFGEYSH

SEQ ID NO: 22659 - protein, 15 aa, Severe acute respiratory syndrome coronavirus 2
  REGION 1..15: note = Table B: HLA-DRB1*11:01L
TFLLNKEMYLKLRSD

SEQ ID NO: 22660 - protein, 14 aa, Severe acute respiratory syndrome coronavirus 2
  REGION 1..14: note = Table B: HLA-DRB1*11:01L
KYFSGAMDTTSYRE

SEQ ID NO: 22661 - protein, 13 aa, Severe acute respiratory syndrome coronavirus 2
  REGION 1..13: note = Table B: HLA-DRB1*11:01L
QSGFRKMAFPSGK

SEQ ID NO: 22662 - protein, 15 aa, Severe acute respiratory syndrome coronavirus 2
  REGION 1..15: note = Table B: HLA-DRB1*11:01L HLA-DPA1*01:03-B1*04:01L HLA-DPA1*01:03-B1*02:01L
LNGLWLDDVVYCPRH

SEQ ID NO: 22663 - protein, 14 aa, Severe acute respiratory syndrome coronavirus 2
  REGION 1..14: note = Table B: HLA-DRB1*11:01L
PNYEDLLIRKSNHN

SEQ ID NO: 22664 - protein, 15 aa, Severe acute respiratory syndrome coronavirus 2
  REGION 1..15: note = Table B: HLA-DRB1*11:01L HLA-DPA1*01:03-B1*04:01L HLA-DPA1*01:03-B1*104:01L HLA-DRB1*07:01L
YEPLTQDHVDILGPL

SEQ ID NO: 22665 - protein, 15 aa, Severe acute respiratory syndrome coronavirus 2
  REGION 1..15: note = Table B: HLA-DRB1*11:01L HLA-DPA1*01:03-B1*104:01L
ILGPLSAQTGIAVLD

SEQ ID NO: 22666 - protein, 15 aa, Severe acute respiratory syndrome coronavirus 2
  REGION 1..15: note = Table B: HLA-DRB1*11:01L HLA-DRB3*01:01L HLA-DRB1*04:08L HLA-DRB1*15:03L
VKRTIKGTHHWLLLT

SEQ ID NO: 22667 - protein, 15 aa, Severe acute respiratory syndrome coronavirus 2
  REGION 1..15: note = Table B: HLA-DRB1*11:01L
LDNRATLQAIASEFS

SEQ ID NO: 22668 - protein, 15 aa, Severe acute respiratory syndrome coronavirus 2
  REGION 1..15: note = Table B: HLA-DRB1*11:01L HLA-DPA1*03:01-B1*105:01L
LKKSLNVAKSEFDRD

SEQ ID NO: 22669 - protein, 14 aa, Severe acute respiratory syndrome coronavirus 2
  REGION 1..14: note = Table B: HLA-DRB1*11:01L
EFDRDAAMQRKLEK

SEQ ID NO: 22670 - protein, 14 aa, Severe acute respiratory syndrome coronavirus 2
  REGION 1..14: note = Table B: HLA-DRB1*11:01L
QQVVDADSKIVQLS

SEQ ID NO: 22671 - protein, 13 aa, Severe acute respiratory syndrome coronavirus 2
  REGION 1..13: note = Table B: HLA-DRB1*11:01L HLA-DRB1*13:01L
VVDADSKIVQLSE

SEQ ID NO: 22672 - protein, 14 aa, Severe acute respiratory syndrome coronavirus 2
  REGION 1..14: note = Table B: HLA-DRB1*11:01L
WPLIVTALRANSAV

SEQ ID NO: 22673 - protein, 14 aa, Severe acute respiratory syndrome coronavirus 2
  REGION 1..14: note = Table B: HLA-DRB1*11:01L
KYLYFIKGLNNLNR

SEQ ID NO: 22674 - protein, 14 aa, Severe acute respiratory syndrome coronavirus 2
  REGION 1..14: note = Table B: HLA-DRB1*11:01L
QPITNCVKMLCTHT

SEQ ID NO: 22675 - protein, 17 aa, Severe acute respiratory syndrome coronavirus 2
  REGION 1..17: note = Table B: HLA-DRB1*11:01L
AKHDFFKFRIDGDMVPH

SEQ ID NO: 22676 - protein, 15 aa, Severe acute respiratory syndrome coronavirus 2
  REGION 1..15: note = Table B: HLA-DRB1*11:01L
FKFRIDGDMVPHISR

SEQ ID NO: 22677 - protein, 14 aa, Severe acute respiratory syndrome coronavirus 2
  REGION 1..14: note = Table B: HLA-DRB1*11:01L
TKYTMADLVYALRH

SEQ ID NO: 22678 - protein, 13 aa, Severe acute respiratory syndrome coronavirus 2
  REGION 1..13: note = Table B: HLA-DRB1*11:01L HLA-DRB1*10:01L HLA-DRB1*15:03L
GYHFRELGVVHNQ

SEQ ID NO: 22679 - protein, 13 aa, Severe acute respiratory syndrome coronavirus 2
  REGION 1..13: note = Table B: HLA-DRB1*11:01L HLA-DPA1*01:03-B1*104:01L HLA-DRB1*08:02L
FSVAALTNNVAFQ

SEQ ID NO: 22680 - protein, 17 aa, Severe acute respiratory syndrome coronavirus 2
  REGION 1..17: note = Table B: HLA-DRB1*11:01L HLA-DRB1*08:03L
EGSSVELKHFFFAQDGN

SEQ ID NO: 22681 - protein, 14 aa, Severe acute respiratory syndrome coronavirus 2
  REGION 1..14: note = Table B: HLA-DRB1*11:01L
GFPFNKWGKARLYY

SEQ ID NO: 22682 - protein, 16 aa, Severe acute respiratory syndrome coronavirus 2
  REGION 1..16: note = Table B: HLA-DRB1*11:01L HLA-DRB3*01:01L HLA-DPA1*02:01-B1*13:01L
GVSICSTMTNRQFHQK

SEQ ID NO: 22683 - protein, 16 aa, Severe acute respiratory syndrome coronavirus 2
  REGION 1..16: note = Table B: HLA-DRB1*11:01L HLA-DPA1*01:03-B1*02:01L
WHNMLKTVYSDVENPH

SEQ ID NO: 22684 - protein, 13 aa, Severe acute respiratory syndrome coronavirus 2
  REGION 1..13: note = Table B: HLA-DRB1*11:01L HLA-DRB4*02:01NL HLA-DRB1*04:10L HLA-DPA1*02:01-B1*13:01L HLA-DPA1*01:03-B1*104:01L HLA-DRB1*14:17L
GDATTAYANSVFN

SEQ ID NO: 22685 - protein, 12 aa, Severe acute respiratory syndrome coronavirus 2
  REGION 1..12: note = Table B: HLA-DRB1*11:01L HLA-DRB1*04:08L
RLYECLYRNRDV

SEQ ID NO: 22686 - protein, 15 aa, Severe acute respiratory syndrome coronavirus 2
  REGION 1..15: note = Table B: HLA-DRB1*11:01L
KSVLYYQNNVFMSEA

SEQ ID NO: 22687 - protein, 14 aa, Severe acute respiratory syndrome coronavirus 2
  REGION 1..14: note = Table B: HLA-DRB1*11:01L
HLSWEVGKPRPPLN

SEQ ID NO: 22688 - protein, 15 aa, Severe acute respiratory syndrome coronavirus 2
  REGION 1..15: note = Table B: HLA-DRB1*11:01L
EKGDYGDAVVYRGTT

SEQ ID NO: 22689 - protein, 15 aa, Severe acute respiratory syndrome coronavirus 2
  REGION 1..15: note = Table B: HLA-DRB1*11:01L HLA-DPA1*01:03-B1*04:01L HLA-DPA1*01:03-B1*04:02L HLA-DPA1*01:03-B1*02:01L HLA-DRB1*15:03L
NARLRAKHYVYIGDP

SEQ ID NO: 22690 - protein, 14 aa, Severe acute respiratory syndrome coronavirus 2
  REGION 1..14: note = Table B: HLA-DRB1*11:01L
KHYVYIGDPAQLPA

SEQ ID NO: 22691 - protein, 13 aa, Severe acute respiratory syndrome coronavirus 2
  REGION 1..13: note = Table B: HLA-DRB1*11:01L HLA-DRB4*02:01NL HLA-DRB3*01:01L HLA-DPA1*01:03-B1*02:01L
IVDTVSALVYDNK

SEQ ID NO: 22692 - protein, 16 aa, Severe acute respiratory syndrome coronavirus 2
  REGION 1..16: note = Table B: HLA-DRB1*11:01L
SAQCFKMFYKGVITHD

SEQ ID NO: 22693 - protein, 15 aa, Severe acute respiratory syndrome coronavirus 2
  REGION 1..15: note = Table B: HLA-DRB1*11:01L HLA-DQA1*01:03-B1*06:01L HLA-DQA1*02:01-B1*03:03L
ITRAKVGILCIMSDR

SEQ ID NO: 22694 - protein, 13 aa, Severe acute respiratory syndrome coronavirus 2
  REGION 1..13: note = Table B: HLA-DRB1*11:01L HLA-DRB1*08:03L
KVITGLHPTQAPT

SEQ ID NO: 22695 - protein, 14 aa, Severe acute respiratory syndrome coronavirus 2
  REGION 1..14: note = Table B: HLA-DRB1*11:01L
GYPNMFITREEAIR

SEQ ID NO: 22696 - protein, 15 aa, Severe acute respiratory syndrome coronavirus 2
  REGION 1..15: note = Table B: HLA-DRB1*11:01L HLA-DRB1*15:01L
VPTGYVDTPNNTDFS

SEQ ID NO: 22697 - protein, 13 aa, Severe acute respiratory syndrome coronavirus 2
  REGION 1..13: note = Table B: HLA-DRB1*11:01L
VKAALLADKFPVL

SEQ ID NO: 22698 - protein, 17 aa, Severe acute respiratory syndrome coronavirus 2
  REGION 1..17: note = Table B: HLA-DRB1*11:01L HLA-DPA1*01:03-B1*04:02L HLA-DPA1*01:03-B1*104:01L HLA-DRB1*10:01L
VETFYPKLQSSQAWQPG

SEQ ID NO: 22699 - protein, 12 aa, Severe acute respiratory syndrome coronavirus 2
  REGION 1..12: note = Table B: HLA-DRB1*11:01L
NLYKMQRMLLEK

SEQ ID NO: 22700 - protein, 14 aa, Severe acute respiratory syndrome coronavirus 2
  REGION 1..14: note = Table B: HLA-DRB1*11:01L HLA-DRB3*01:01L
EHSWNADLYKLMGH

SEQ ID NO: 22701 - protein, 13 aa, Severe acute respiratory syndrome coronavirus 2
  REGION 1..13: note = Table B: HLA-DRB1*11:01L HLA-DPA1*01:03-B1*02:01L
DKVFRSSVLHSTQ

SEQ ID NO: 22702 - protein, 16 aa, Severe acute respiratory syndrome coronavirus 2
  REGION 1..16: note = Table B: HLA-DRB1*11:01L HLA-DRB1*08:03L
SNIIRGWIFGTTLDSK

SEQ ID NO: 22703 - protein, 11 aa, Severe acute respiratory syndrome coronavirus 2
  REGION 1..11: note = Table B: HLA-DRB1*11:01L HLA-DRB1*12:01L HLA-DPA1*01:02-B1*04:01L HLA-DRB1*08:02L
REFVFKNIDGY

SEQ ID NO: 22704 - protein, 11 aa, Severe acute respiratory syndrome coronavirus 2
  REGION 1..11: note = Table B: HLA-DRB1*11:01L
YYVGYLQPRTF

SEQ ID NO: 22705 - protein, 13 aa, Severe acute respiratory syndrome coronavirus 2
  REGION 1..13: note = Table B: HLA-DRB1*11:01L
NYLYRLFRKSNLK

SEQ ID NO: 22706 - protein, 14 aa, Severe acute respiratory syndrome coronavirus 2
  REGION 1..14: note = Table B: HLA-DRB1*11:01L
LLQYGSFCTQLNRA

SEQ ID NO: 22707 - protein, 14 aa, Severe acute respiratory syndrome coronavirus 2
  REGION 1..14: note = Table B: HLA-DRB1*11:01L
IANQFNSAIGKIQD

SEQ ID NO: 22708 - protein, 15 aa, Severe acute respiratory syndrome coronavirus 2
  REGION 1..15: note = Table B: HLA-DRB1*11:01L
DVVNQNAQALNTLVK

SEQ ID NO: 22709 - protein, 13 aa, Severe acute respiratory syndrome coronavirus 2
  REGION 1..13: note = Table B: HLA-DRB1*11:01L HLA-DRB1*04:10L HLA-DRB1*15:03L
NDILSRLDKVEAE

SEQ ID NO: 22710 - protein, 15 aa, Severe acute respiratory syndrome coronavirus 2
  REGION 1..15: note = Table B: HLA-DRB1*11:01L HLA-DPA1*01:02-B1*04:01L HLA-DRB1*07:01L HLA-DRB1*16:01L HLA-DRB1*15:03L
AATKMSECVLGQSKR

SEQ ID NO: 22711 - protein, 15 aa, Severe acute respiratory syndrome coronavirus 2
  REGION 1..15: note = Table B: HLA-DRB1*11:01L
GQSKRVDFCGKGYHL

SEQ ID NO: 22712 - protein, 18 aa, Severe acute respiratory syndrome coronavirus 2
  REGION 1..18: note = Table B: HLA-DRB1*11:01L HLA-DPA1*03:01-B1*105:01L
DGKAHFPREGVFVSNGTH

SEQ ID NO: 22713 - protein, 14 aa, Severe acute respiratory syndrome coronavirus 2
  REGION 1..14: note = Table B: HLA-DRB1*11:01L
LIDLQELGKYEQYI

SEQ ID NO: 22714 - protein, 14 aa, Severe acute respiratory syndrome coronavirus 2
  REGION 1..14: note = Table B: HLA-DRB1*11:01L
EEHVQIHTIDGSSG

SEQ ID NO: 22715 - protein, 17 aa, Severe acute respiratory syndrome coronavirus 2
  REGION 1..17: note = Table B: HLA-DRB1*11:01L HLA-DRB4*01:01L
EHVQIHTIDGSSGVVNP

SEQ ID NO: 22716 - protein, 14 aa, Severe acute respiratory syndrome coronavirus 2
  REGION 1..14: note = Table B: HLA-DRB1*11:01L HLA-DQA1*05:05-B1*03:116L HLA-DRB1*15:03L
IDGSSGVVNPVMEP

SEQ ID NO: 22717 - protein, 15 aa, Severe acute respiratory syndrome coronavirus 2
  REGION 1..15: note = Table B: HLA-DRB1*11:01L HLA-DPA1*01:02-B1*04:01L HLA-DRB1*08:02L
TENKYSQLDEEQPME

SEQ ID NO: 22718 - protein, 16 aa, Severe acute respiratory syndrome coronavirus 2
  REGION 1..16: note = Table B: HLA-DRB1*11:01L
KLFIRQEEVQELYSPI

SEQ ID NO: 22719 - protein, 16 aa, Severe acute respiratory syndrome coronavirus 2
  REGION 1..16: note = Table B: HLA-DRB1*11:01L HLA-DQA1*02:01-B1*03:03L
VAAFHQECSLQSCTQH

SEQ ID NO: 22720 - protein, 18 aa, Severe acute respiratory syndrome coronavirus 2
  REGION 1..18: note = Table B: HLA-DRB1*11:01L
LPFTINCQEPKLGSLVVR

SEQ ID NO: 22721 - protein, 16 aa, Severe acute respiratory syndrome coronavirus 2
  REGION 1..16: note = Table B: HLA-DRB1*11:01L HLA-DQA1*05:01-B1*02:01L HLA-DPA1*01:03-B1*04:02L
TPGSSRGTSPARMAGN

SEQ ID NO: 22722 - protein, 14 aa, Severe acute respiratory syndrome coronavirus 2
  REGION 1..14: note = Table B: HLA-DRB1*11:01L
GTDYKHWPQIAQFA

SEQ ID NO: 22723 - protein, 13 aa, Severe acute respiratory syndrome coronavirus 2
  REGION 1..13: note = Table B: HLA-DRB1*11:01L HLA-DPA1*01:03-B1*04:02L
YTGAIKLDDKDPN

SEQ ID NO: 22724 - protein, 15 aa, Severe acute respiratory syndrome coronavirus 2
  REGION 1..15: note = Table B: HLA-DRB5*01:01L HLA-DRB1*09:01L HLA-DPA1*01:03-B1*04:02L HLA-DRB1*07:01L
TQYEYGTEDDYQGKP

SEQ ID NO: 22725 - protein, 11 aa, Severe acute respiratory syndrome coronavirus 2
  REGION 1..11: note = Table B: HLA-DRB5*01:01L HLA-DRB1*15:01L
TTYPGQGLNGY

SEQ ID NO: 22726 - protein, 17 aa, Severe acute respiratory syndrome coronavirus 2
  REGION 1..17: note = Table B: HLA-DRB5*01:01L HLA-DRB1*13:01L HLA-DRB1*15:01L
DTNVLEGSVAYESLRPD

SEQ ID NO: 22727 - protein, 16 aa, Severe acute respiratory syndrome coronavirus 2
  REGION 1..16: note = Table B: HLA-DRB5*01:01L
DVQQWGFTGNLQSNHD

SEQ ID NO: 22728 - protein, 15 aa, Severe acute respiratory syndrome coronavirus 2
  REGION 1..15: note = Table B: HLA-DRB5*01:01L HLA-DRB4*02:01NL HLA-DRB1*08:02L
LRQWLPTGTLLVDSD

SEQ ID NO: 22729 - protein, 15 aa, Severe acute respiratory syndrome coronavirus 2
  REGION 1..15: note = Table B: HLA-DRB5*01:01L
ENQKLIANQFNSAIG

SEQ ID NO: 22730 - protein, 10 aa, Severe acute respiratory syndrome coronavirus 2
  REGION 1..10: note = Table B: HLA-DQA1*01-B1*05L
VPGFNEKTHV

SEQ ID NO: 22731 - protein, 10 aa, Severe acute respiratory syndrome coronavirus 2
  REGION 1..10: note = Table B: HLA-DQA1*01-B1*05L
LVRGFGDSVE

SEQ ID NO: 22732 - protein, 11 aa, Severe acute respiratory syndrome coronavirus 2
  REGION 1..11: note = Table B: HLA-DQA1*01-B1*05L
LKSFDLGDELG

SEQ ID NO: 22733 - protein, 13 aa, Severe acute respiratory syndrome coronavirus 2
  REGION 1..13: note = Table B: HLA-DQA1*01-B1*05L
FDLGDELGTDPYE

SEQ ID NO: 22734 - protein, 10 aa, Severe acute respiratory syndrome coronavirus 2
  REGION 1..10: note = Table B: HLA-DQA1*01-B1*05L
DELGTDPYED

SEQ ID NO: 22735 - protein, 10 aa, Severe acute respiratory syndrome coronavirus 2
  REGION 1..10: note = Table B: HLA-DQA1*01-B1*05L
GTDPYEDFQE

SEQ ID NO: 22736 - protein, 10 aa, Severe acute respiratory syndrome coronavirus 2
  REGION 1..10: note = Table B: HLA-DQA1*01-B1*05L
TDPYEDFQEN

SEQ ID NO: 22737 - protein, 10 aa, Severe acute respiratory syndrome coronavirus 2
  REGION 1..10: note = Table B: HLA-DQA1*01-B1*05L
PYEDFQENWN

SEQ ID NO: 22738 - protein, 14 aa, Severe acute respiratory syndrome coronavirus 2
  REGION 1..14: note = Table B: HLA-DQA1*01-B1*05L HLA-DPA1*03:01-B1*105:01L
AYTRYVDNNFCGPD

SEQ ID NO: 22739 - protein, 11 aa, Severe acute respiratory syndrome coronavirus 2
  REGION 1..11: note = Table B: HLA-DQA1*01-B1*05L
LSEQLDFIDTK

SEQ ID NO: 22740 - protein, 10 aa, Severe acute respiratory syndrome coronavirus 2
  REGION 1..10: note = Table B: HLA-DQA1*01-B1*05L HLA-DQA1*03:01-B1*03:02L HLA-DQA1*01:03-B1*06:01L
EIAWYTERSE

SEQ ID NO: 22741 - protein, 10 aa, Severe acute respiratory syndrome coronavirus 2
  REGION 1..10: note = Table B: HLA-DQA1*01-B1*05L
LAEYHNESGL

SEQ ID NO: 22742 - protein, 10 aa, Severe acute respiratory syndrome coronavirus 2
  REGION 1..10: note = Table B: HLA-DQA1*01-B1*05L
SEGLNDNLLE

SEQ ID NO: 22743 - protein, 11 aa, Severe acute respiratory syndrome coronavirus 2
  REGION 1..11: note = Table B: HLA-DQA1*01-B1*05L HLA-DQA1*03:01-B1*03:02L
VGDFKLNEEIA

SEQ ID NO: 22744 - protein, 13 aa, Severe acute respiratory syndrome coronavirus 2
  REGION 1..13: note = Table B: HLA-DQA1*01-B1*05L HLA-DRB1*04:08L
VVRSIFSRTLETA

SEQ ID NO: 22745 - protein, 10 aa, Severe acute respiratory syndrome coronavirus 2
  REGION 1..10: note = Table B: HLA-DQA1*01-B1*05L
ISQYSLRLID

SEQ ID NO: 22746 - protein, 12 aa, Severe acute respiratory syndrome coronavirus 2
  REGION 1..12: note = Table B: HLA-DQA1*01-B1*05L
IDAMMFTSDLAT

SEQ ID NO: 22747 - protein, 12 aa, Severe acute respiratory syndrome coronavirus 2
  REGION 1..12: note = Table B: HLA-DQA1*01-B1*05L
DAMMFTSDLATN

SEQ ID NO: 22748 - protein, 11 aa, Severe acute respiratory syndrome coronavirus 2
  REGION 1..11: note = Table B: HLA-DQA1*01-B1*05L HLA-DQA1*05:01-B1*02:01L
KPVLDWLEEKF

SEQ ID NO: 22749 - protein, 10 aa, Severe acute respiratory syndrome coronavirus 2
  REGION 1..10: note = Table B: HLA-DQA1*01-B1*05L
VLDWLEEKFK

SEQ ID NO: 22750 - protein, 11 aa, Severe acute respiratory syndrome coronavirus 2
  REGION 1..11: note = Table B: HLA-DQA1*01-B1*05L HLA-DQA1*01:03-B1*06:01L
EGVEFLRDGWE

SEQ ID NO: 22751 - protein, 12 aa, Severe acute respiratory syndrome coronavirus 2
  REGION 1..12: note = Table B: HLA-DQA1*01-B1*05L HLA-DQA1*03:01-B1*03:02L
APKEIIFLEGET

SEQ ID NO: 22752 - protein, 11 aa, Severe acute respiratory syndrome coronavirus 2
  REGION 1..11: note = Table B: HLA-DQA1*01-B1*05L HLA-DQA1*05:01-B1*02:01L
LEGETLPTEVL

SEQ ID NO: 22753 - protein, 12 aa, Severe acute respiratory syndrome coronavirus 2
  REGION 1..12: note = Table B: HLA-DQA1*01-B1*05L HLA-DQA1*05:01-B1*02:01L HLA-DQA1*03:01-B1*03:02L
TLPTEVLTEEVV

SEQ ID NO: 22754 - protein, 12 aa, Severe acute respiratory syndrome coronavirus 2
  REGION 1..12: note = Table B: HLA-DQA1*01-B1*05L HLA-DQA1*05:01-B1*02:01L
LPTEVLTEEVVL

SEQ ID NO: 22755 - protein, 11 aa, Severe acute respiratory syndrome coronavirus 2
  REGION 1..11: note = Table B: HLA-DQA1*01-B1*05L HLA-DQA1*03:01-B1*03:02L HLA-DQA1*02:01-B1*03:03L
APTKVTFGDDT

SEQ ID NO: 22756 - protein, 12 aa, Severe acute respiratory syndrome coronavirus 2
  REGION 1..12: note = Table B: HLA-DQA1*01-B1*05L
PTKVTFGDDTVI

SEQ ID NO: 22757 - protein, 10 aa, Severe acute respiratory syndrome coronavirus 2
  REGION 1..10: note = Table B: HLA-DQA1*01-B1*05L HLA-DQA1*05:01-B1*02:01L
VTFGDDTVIE

SEQ ID NO: 22758 - protein, 12 aa, Severe acute respiratory syndrome coronavirus 2
  REGION 1..12: note = Table B: HLA-DQA1*01-B1*05L
TFGDDTVIEVQG

SEQ ID NO: 22759 - protein, 14 aa, Severe acute respiratory syndrome coronavirus 2
  REGION 1..14: note = Table B: HLA-DQA1*01-B1*05L HLA-DQA1*01:03-B1*06:01L
GTEVNEFACVVADA

SEQ ID NO: 22760 - protein, 13 aa, Severe acute respiratory syndrome coronavirus 2
  REGION 1..13: note = Table B: HLA-DQA1*01-B1*05L
SELLTPLGIDLDE

SEQ ID NO: 22761 - protein, 11 aa, Severe acute respiratory syndrome coronavirus 2
  REGION 1..11: note = Table B: HLA-DQA1*01-B1*05L
TPLGIDLDEWS

SEQ ID NO: 22762 - protein, 15 aa, Severe acute respiratory syndrome coronavirus 2
  REGION 1..15: note = Table B: HLA-DQA1*01-B1*05L HLA-DQA1*05:01-B1*02:01L HLA-DPA1*01:03-B1*04:02L HLA-DPA1*01:02-B1*04:01L HLA-DQA1*01:03-B1*06:01L
DEWSMATYYLFDESG

SEQ ID NO: 22763 - protein, 12 aa, Severe acute respiratory syndrome coronavirus 2
  REGION 1..12: note = Table B: HLA-DQA1*01-B1*05L
MATYYLFDESGE

SEQ ID NO: 22764 - protein, 13 aa, Severe acute respiratory syndrome coronavirus 2
  REGION 1..13: note = Table B: HLA-DQA1*01-B1*05L
SHMYCSFYPPDED

SEQ ID NO: 22765 - protein, 13 aa, Severe acute respiratory syndrome coronavirus 2
  REGION 1..13: note = Table B: HLA-DQA1*01-B1*05L
HMYCSFYPPDEDE

SEQ ID NO: 22766 - protein, 10 aa, Severe acute respiratory syndrome coronavirus 2
  REGION 1..10: note = Table B: HLA-DQA1*01-B1*05L
SFYPPDEDEE

SEQ ID NO: 22767 - protein, 19 aa, Severe acute respiratory syndrome coronavirus 2
  REGION 1..19: note = Table B: HLA-DQA1*01-B1*05L
YPPDEDEEEGDCEEEEFEP

SEQ ID NO: 22768 - protein, 14 aa, Severe acute respiratory syndrome coronavirus 2
  REGION 1..14: note = Table B: HLA-DQA1*01-B1*05L
EEGDCEEEEFEPST

SEQ ID NO: 22769 - protein, 13 aa, Severe acute respiratory syndrome coronavirus 2
  REGION 1..13: note = Table B: HLA-DQA1*01-B1*05L
GDCEEEEFEPSTQ

SEQ ID NO: 22770 - protein, 13 aa, Severe acute respiratory syndrome coronavirus 2
  REGION 1..13: note = Table B: HLA-DQA1*01-B1*05L
PSTQYEYGTEDDY

SEQ ID NO: 22771 - protein, 10 aa, Severe acute respiratory syndrome coronavirus 2
  REGION 1..10: note = Table B: HLA-DQA1*01-B1*05L
YEYGTEDDYQ

SEQ ID NO: 22772 - protein, 11 aa, Severe acute respiratory syndrome coronavirus 2
  REGION 1..11: note = Table B: HLA-DQA1*01-B1*05L
EEQEEDWLDDD

SEQ ID NO: 22773 - protein, 11 aa, Severe acute respiratory syndrome coronavirus 2
  REGION 1..11: note = Table B: HLA-DQA1*01-B1*05L
EQEEDWLDDDS

SEQ ID NO: 22774 - protein, 10 aa, Severe acute respiratory syndrome coronavirus 2
  REGION 1..10: note = Table B: HLA-DQA1*01-B1*05L
EEDWLDDDSQ

SEQ ID NO: 22775 - protein, 10 aa, Severe acute respiratory syndrome coronavirus 2
  REGION 1..10: note = Table B: HLA-DQA1*01-B1*05L
EDWLDDDSQQ

SEQ ID NO: 22776 - protein, 12 aa, Severe acute respiratory syndrome coronavirus 2
  REGION 1..12: note = Table B: HLA-DQA1*01-B1*05L
DWLDDDSQQTVG

SEQ ID NO: 22777 - protein, 11 aa, Severe acute respiratory syndrome coronavirus 2
  REGION 1..11: note = Table B: HLA-DQA1*01-B1*05L
DNVYIKNADIV

SEQ ID NO: 22778 - protein, 11 aa, Severe acute respiratory syndrome coronavirus 2
  REGION 1..11: note = Table B: HLA-DQA1*01-B1*05L HLA-DQA1*03:01-B1*03:02L HLA-DRB1*16:01L HLA-DQA1*01:03-B1*06:01L HLA-DQA1*02:01-B1*03:03L
YIKNADIVEEA

SEQ ID NO: 22779 - protein, 11 aa, Severe acute respiratory syndrome coronavirus 2
  REGION 1..11: note = Table B: HLA-DQA1*01-B1*05L
AMQVESDDYIA

SEQ ID NO: 22780 - protein, 12 aa, Severe acute respiratory syndrome coronavirus 2
  REGION 1..12: note = Table B: HLA-DQA1*01-B1*05L HLA-DQA1*05:01-B1*02:01L
MQVESDDYIATN

SEQ ID NO: 22781 - protein, 11 aa, Severe acute respiratory syndrome coronavirus 2
  REGION 1..11: note = Table B: HLA-DQA1*01-B1*05L HLA-DQA1*01:03-B1*06:01L
LVSSFLEMKSE

SEQ ID NO: 22782 - protein, 12 aa, Severe acute respiratory syndrome coronavirus 2
  REGION 1..12: note = Table B: HLA-DQA1*01-B1*05L HLA-DRB1*15:03L
ENLLLYIDINGN

SEQ ID NO: 22783 - protein, 13 aa, Severe acute respiratory syndrome coronavirus 2
  REGION 1..13: note = Table B: HLA-DQA1*01-B1*05L
SATLVSDIDITFL

SEQ ID NO: 22784 - protein, 11 aa, Severe acute respiratory syndrome coronavirus 2
  REGION 1..11: note = Table B: HLA-DQA1*01-B1*05L HLA-DQA1*03:01-B1*03:02L
DAPYIVGDVVQ

SEQ ID NO: 22785 - protein, 11 aa, Severe acute respiratory syndrome coronavirus 2
  REGION 1..11: note = Table B: HLA-DQA1*01-B1*05L HLA-DQA1*03:01-B1*03:02L
PYIVGDVVQEG

SEQ ID NO: 22786 - protein, 13 aa, Severe acute respiratory syndrome coronavirus 2
  REGION 1..13: note = Table B: HLA-DQA1*01-B1*05L
VPATVSVSSPDAV

SEQ ID NO: 22787 - protein, 10 aa, Severe acute respiratory syndrome coronavirus 2
  REGION 1..10: note = Table B: HLA-DQA1*01-B1*05L
AVTAYNGYLT

SEQ ID NO: 22788 - protein, 10 aa, Severe acute respiratory syndrome coronavirus 2
  REGION 1..10: note = Table B: HLA-DQA1*01-B1*05L HLA-DQA1*05:05-B1*03:19L HLA-DQA1*05:05-B1*03:116L HLA-DPA1*02:01-B1*13:01L
TPEEHFIETI

SEQ ID NO: 22789 - protein, 10 aa, Severe acute respiratory syndrome coronavirus 2
  REGION 1..10: note = Table B: HLA-DQA1*01-B1*05L
AGSYKDWSYS

SEQ ID NO: 22790 - protein, 10 aa, Severe acute respiratory syndrome coronavirus 2
  REGION 1..10: note = Table B: HLA-DQA1*01-B1*05L
GSYKDWSYSG

SEQ ID NO: 22791 - protein, 11 aa, Severe acute respiratory syndrome coronavirus 2
  REGION 1..11: note = Table B: HLA-DQA1*01-B1*05L HLA-DQA1*03:01-B1*03:02L
KDWSYSGQSTQ

SEQ ID NO: 22792 - protein, 11 aa, Severe acute respiratory syndrome coronavirus 2
  REGION 1..11: note = Table B: HLA-DQA1*01-B1*05L
NPTTFHLDGEV

SEQ ID NO: 22793 - protein, 11 aa, Severe acute respiratory syndrome coronavirus 2
  REGION 1..11: note = Table B: HLA-DQA1*01-B1*05L HLA-DQA1*03:01-B1*03:02L
GPTYLDGADVT

SEQ ID NO: 22794 - protein, 10 aa, Severe acute respiratory syndrome coronavirus 2
  REGION 1..10: note = Table B: HLA-DQA1*01-B1*05L
KTFYVLPNDD

SEQ ID NO: 22795 - protein, 10 aa, Severe acute respiratory syndrome coronavirus 2
  REGION 1..10: note = Table B: HLA-DQA1*01-B1*05L HLA-DQA1*05:01-B1*02:01L HLA-DQA1*03:01-B1*03:02L
DDTLRVEAFE

SEQ ID NO: 22796 - protein, 12 aa, Severe acute respiratory syndrome coronavirus 2
  REGION 1..12: note = Table B: HLA-DQA1*01-B1*05L HLA-DPA1*03:01-B1*105:01L HLA-DPA1*01:02-B1*04:01L
VEAFEYYHTTDP

SEQ ID NO: 22797 - protein, 10 aa, Severe acute respiratory syndrome coronavirus 2
  REGION 1..10: note = Table B: HLA-DQA1*01-B1*05L
FEYYHTTDPS

SEQ ID NO: 22798 - protein, 11 aa, Severe acute respiratory syndrome coronavirus 2
  REGION 1..11: note = Table B: HLA-DQA1*01-B1*05L HLA-DQA1*02:01-B1*03:03L HLA-DRB1*15:03L
TSIKWADNNCY

SEQ ID NO: 22799 - protein, 11 aa, Severe acute respiratory syndrome coronavirus 2
  REGION 1..11: note = Table B: HLA-DQA1*01-B1*05L
MSYLFQHANLD

SEQ ID NO: 22800 - protein, 11 aa, Severe acute respiratory syndrome coronavirus 2
  REGION 1..11: note = Table B: HLA-DQA1*01-B1*05L HLA-DQA1*03:01-B1*03:02L
ATKYLVQQESP

SEQ ID NO: 22801 - protein, 14 aa, Severe acute respiratory syndrome coronavirus 2
  REGION 1..14: note = Table B: HLA-DQA1*01-B1*05L HLA-DPA1*02:01-B1*13:01L
ITSKETLYCIDGAL

SEQ ID NO: 22802 - protein, 13 aa, Severe acute respiratory syndrome coronavirus 2
  REGION 1..13: note = Table B: HLA-DQA1*01-B1*05L HLA-DRB1*15:03L
SKETLYCIDGALL

SEQ ID NO: 22803 - protein, 10 aa, Severe acute respiratory syndrome coronavirus 2
  REGION 1..10: note = Table B: HLA-DQA1*01-B1*05L HLA-DPA1*03:01-B1*105:01L HLA-DQA1*01:03-B1*06:01L
PITDVFYKEN

SEQ ID NO: 22804 - protein, 12 aa, Severe acute respiratory syndrome coronavirus 2
  REGION 1..12: note = Table B: HLA-DQA1*01-B1*05L
IKPVTYKLDGVV

SEQ ID NO: 22805 - protein, 10 aa, Severe acute respiratory syndrome coronavirus 2
  REGION 1..10: note = Table B: HLA-DQA1*01-B1*05L
NSYFTEQPID

SEQ ID NO: 22806 - protein, 10 aa, Severe acute respiratory syndrome coronavirus 2
  REGION 1..10: note = Table B: HLA-DQA1*01-B1*05L HLA-DQA1*03:01-B1*03:02L
DNIKFADDLN

SEQ ID NO: 22807 - protein, 10 aa, Severe acute respiratory syndrome coronavirus 2
  REGION 1..10: note = Table B: HLA-DQA1*01-B1*05L
KVTFFPDLNG

SEQ ID NO: 22808 - protein, 10 aa, Severe acute respiratory syndrome coronavirus 2
  REGION 1..10: note = Table B: HLA-DQA1*01-B1*05L
VTFFPDLNGD

SEQ ID NO: 22809 - protein, 11 aa, Severe acute respiratory syndrome coronavirus 2
  REGION 1..11: note = Table B: HLA-DQA1*01-B1*05L HLA-DQA1*02:01-B1*03:03L
KSEDAQGMDNL

SEQ ID NO: 22810 - protein, 11 aa, Severe acute respiratory syndrome coronavirus 2
  REGION 1..11: note = Table B: HLA-DQA1*01-B1*05L HLA-DQA1*05:01-B1*02:01L
EDLKPVSEEVV

SEQ ID NO: 22811 - protein, 10 aa, Severe acute respiratory syndrome coronavirus 2
  REGION 1..10: note = Table B: HLA-DQA1*01-B1*05L HLA-DQA1*03:01-B1*03:02L
EEVVENPTIQ

SEQ ID NO: 22812 - protein, 11 aa, Severe acute respiratory syndrome coronavirus 2
  REGION 1..11: note = Table B: HLA-DQA1*01-B1*05L HLA-DQA1*05:01-B1*02:01L HLA-DQA1*03:01-B1*03:02L HLA-DQA1*01:03-B1*06:01L HLA-DQA1*02:01-B1*03:03L
VKTTEVVGDII

SEQ ID NO: 22813 - protein, 11 aa, Severe acute respiratory syndrome coronavirus 2
  REGION 1..11: note = Table B: HLA-DQA1*01-B1*05L
EEVGHTDLMAA

SEQ ID NO: 22814 - protein, 10 aa, Severe acute respiratory syndrome coronavirus 2
  REGION 1..10: note = Table B: HLA-DQA1*01-B1*05L
LMAAYVDNSS

SEQ ID NO: 22815 - protein, 11 aa, Severe acute respiratory syndrome coronavirus 2
  REGION 1..11: note = Table B: HLA-DQA1*01-B1*05L
REGYLNSTNVT

SEQ ID NO: 22816 - protein, 10 aa, Severe acute respiratory syndrome coronavirus 2
  REGION 1..10: note = Table B: HLA-DQA1*01-B1*05L HLA-DQA1*05:01-B1*02:01L HLA-DQA1*03:01-B1*03:02L HLA-DQA1*01:03-B1*06:01L
DTYPSLETIQ

SEQ ID NO: 22817 - protein, 13 aa, Severe acute respiratory syndrome coronavirus 2
  REGION 1..13: note = Table B: HLA-DQA1*01-B1*05L HLA-DRB1*09:01L HLA-DPA1*01:03-B1*04:02L HLA-DPA1*02:01-B1*13:01L HLA-DPA1*01:03-B1*104:01L HLA-DPA1*01:02-B1*04:01L HLA-DRB1*10:01L HLA-DRB1*04:08L
IINLVQMAPISAM

SEQ ID NO: 22818 - protein, 11 aa, Severe acute respiratory syndrome coronavirus 2
  REGION 1..11: note = Table B: HLA-DQA1*01-B1*05L
AGSTFISDEVA

SEQ ID NO: 22819 - protein, 13 aa, Severe acute respiratory syndrome coronavirus 2
  REGION 1..13: note = Table B: HLA-DQA1*01-B1*05L HLA-DQA1*05:01-B1*02:01L
NPTDQSSYIVDSV

SEQ ID NO: 22820 - protein, 10 aa, Severe acute respiratory syndrome coronavirus 2
  REGION 1..10: note = Table B: HLA-DQA1*01-B1*05L
IHLYFDKAGQ

SEQ ID NO: 22821 - protein, 10 aa, Severe acute respiratory syndrome coronavirus 2
  REGION 1..10: note = Table B: HLA-DQA1*01-B1*05L
LSHFVNLDNL

SEQ ID NO: 22822 - protein, 13 aa, Severe acute respiratory syndrome coronavirus 2
  REGION 1..13: note = Table B: HLA-DQA1*01-B1*05L
SAKSASVYYSQLM

SEQ ID NO: 22823 - protein, 16 aa, Severe acute respiratory syndrome coronavirus 2
  REGION 1..16: note = Table B: HLA-DQA1*01-B1*05L
AKSASVYYSQLMCQPI

SEQ ID NO: 22824 - protein, 11 aa, Severe acute respiratory syndrome coronavirus 2
  REGION 1..11: note = Table B: HLA-DQA1*01-B1*05L HLA-DQA1*05:01-B1*02:01L HLA-DRB1*12:01L HLA-DQA1*03:01-B1*03:02L HLA-DQA1*02:01-B1*03:03L
KTLVATAEAEL

SEQ ID NO: 22825 - protein, 10 aa, Severe acute respiratory syndrome coronavirus 2
  REGION 1..10: note = Table B: HLA-DQA1*01-B1*05L HLA-DQA1*03:01-B1*03:02L
AKNVSLDNVL

SEQ ID NO: 22826 - protein, 13 aa, Severe acute respiratory syndrome coronavirus 2
  REGION 1..13: note = Table B: HLA-DQA1*01-B1*05L HLA-DPA1*02:01-B1*13:01L HLA-DPA1*01:03-B1*104:01L
FISAARQGFVDSD

SEQ ID NO: 22827 - protein, 11 aa, Severe acute respiratory syndrome coronavirus 2
  REGION 1..11: note = Table B: HLA-DQA1*01-B1*05L
AARQGFVDSDV

SEQ ID NO: 22828 - protein, 10 aa, Severe acute respiratory syndrome coronavirus 2
  REGION 1..10: note = Table B: HLA-DQA1*01-B1*05M HLA-DQA1*05:01-B1*02:01L HLA-DQA1*03:01-B1*03:02L
RQGFVDSDVE

SEQ ID NO: 22829 - protein, 10 aa, Severe acute respiratory syndrome coronavirus 2
  REGION 1..10: note = Table B: HLA-DQA1*01-B1*05L
QGFVDSDVET

SEQ ID NO: 22830 - protein, 10 aa, Severe acute respiratory syndrome coronavirus 2
  REGION 1..10: note = Table B: HLA-DQA1*01-B1*05L
LSHQSDIEVT

SEQ ID NO: 22831 - protein, 11 aa, Severe acute respiratory syndrome coronavirus 2
  REGION 1..11: note = Table B: HLA-DQA1*01-B1*05L HLA-DQA1*03:01-B1*03:02L HLA-DPA1*01:02-B1*04:01L HLA-DQA1*01:03-B1*06:01L HLA-DQA1*02:01-B1*03:03L
NNYMLTYNKVE

SEQ ID NO: 22832 - protein, 10 aa, Severe acute respiratory syndrome coronavirus 2
  REGION 1..10: note = Table B: HLA-DQA1*01-B1*05L
VKDFMSLSEQ

SEQ ID NO: 22833 - protein, 13 aa, Severe acute respiratory syndrome coronavirus 2
  REGION 1..13: note = Table B: HLA-DQA1*01-B1*05L
VMSKHTDFSSEII

SEQ ID NO: 22834 - protein, 12 aa, Severe acute respiratory syndrome coronavirus 2
  REGION 1..12: note = Table B: HLA-DQA1*01-B1*05L
ANKHADFDTWFS

SEQ ID NO: 22835 - protein, 12 aa, Severe acute respiratory syndrome coronavirus 2
  REGION 1..12: note = Table B: HLA-DQA1*01-B1*05L
NKHADFDTWFSQ

SEQ ID NO: 22836 - protein, 10 aa, Severe acute respiratory syndrome coronavirus 2
  REGION 1..10: note = Table B: HLA-DQA1*01-B1*05L
DFDTWFSQRG

SEQ ID NO: 22837 - protein, 13 aa, Severe acute respiratory syndrome coronavirus 2
  REGION 1..13: note = Table B: HLA-DQA1*01-B1*05L
ITREVGFVVPGLP

SEQ ID NO: 22838 - protein, 11 aa, Severe acute respiratory syndrome coronavirus 2
  REGION 1..11: note = Table B: HLA-DQA1*01-B1*05L HLA-DQA1*03:01-B1*03:02L
EVGFVVPGLPG

SEQ ID NO: 22839 - protein, 11 aa, Severe acute respiratory syndrome coronavirus 2
  REGION 1..11: note = Table B: HLA-DQA1*01-B1*05L
TPSKLIEYTDF

SEQ ID NO: 22840 - protein, 10 aa, Severe acute respiratory syndrome coronavirus 2
  REGION 1..10: note = Table B: HLA-DQA1*01-B1*05L
KLIEYTDFAT

SEQ ID NO: 22841 - protein, 10 aa, Severe acute respiratory syndrome coronavirus 2
  REGION 1..10: note = Table B: HLA-DQA1*01-B1*05L
LIEYTDFATS

SEQ ID NO: 22842 - protein, 12 aa, Severe acute respiratory syndrome coronavirus 2
  REGION 1..12: note = Table B: HLA-DQA1*01-B1*05L
KPVPYCYDTNVL

SEQ ID NO: 22843 - protein, 15 aa, Severe acute respiratory syndrome coronavirus 2
  REGION 1..15: note = Table B: HLA-DQA1*01-B1*05L
PVPYCYDTNVLEGSV

SEQ ID NO: 22844 - protein, 12 aa, Severe acute respiratory syndrome coronavirus 2
  REGION 1..12: note = Table B: HLA-DQA1*01-B1*05L
IQFPNTYLEGSV

SEQ ID NO: 22845 - protein, 11 aa, Severe acute respiratory syndrome coronavirus 2
  REGION 1..11: note = Table B: HLA-DQA1*01-B1*05L HLA-DQA1*01:03-B1*06:01L
VVTTFDSEYCR

SEQ ID NO: 22846 - protein, 11 aa, Severe acute respiratory syndrome coronavirus 2
  REGION 1..11: note = Table B: HLA-DQA1*01-B1*05L HLA-DPA1*01:02-B1*04:01L
LNNDYYRSLPG

SEQ ID NO: 22847 - protein, 10 aa, Severe acute respiratory syndrome coronavirus 2
  REGION 1..10: note = Table B: HLA-DQA1*01-B1*05L
FYWFFSNYLK

SEQ ID NO: 22848 - protein, 11 aa, Severe acute respiratory syndrome coronavirus 2
  REGION 1..11: note = Table B: HLA-DQA1*01-B1*05L
NKYKYFSGAMD

SEQ ID NO: 22849 - protein, 10 aa, Severe acute respiratory syndrome coronavirus 2
  REGION 1..10: note = Table B: HLA-DQA1*01-B1*05L
YKYFSGAMDT

SEQ ID NO: 22850 - protein, 11 aa, Severe acute respiratory syndrome coronavirus 2
  REGION 1..11: note = Table B: HLA-DQA1*01-B1*05L HLA-DQA1*05:01-B1*02:01L HLA-DQA1*03:01-B1*03:02L
NDFSNSGSDVL

SEQ ID NO: 22851 - protein, 11 aa, Severe acute respiratory syndrome coronavirus 2
  REGION 1..11: note = Table B: HLA-DQA1*01-B1*05L
TTLNGLWLDDV

SEQ ID NO: 22852 - protein, 10 aa, Severe acute respiratory syndrome coronavirus 2
  REGION 1..10: note = Table B: HLA-DQA1*01-B1*05L
LNGLWLDDVV

SEQ ID NO: 22853 - protein, 10 aa, Severe acute respiratory syndrome coronavirus 2
  REGION 1..10: note = Table B: HLA-DQA1*01-B1*05L HLA-DQA1*05:05-B1*03:19L HLA-DQA1*05:01-B1*02:01L
NGLWLDDVVY

SEQ ID NO: 22854 - protein, 11 aa, Severe acute respiratory syndrome coronavirus 2
  REGION 1..11: note = Table B: HLA-DQA1*01-B1*05L
EDMLNPNYEDL

SEQ ID NO: 22855 - protein, 10 aa, Severe acute respiratory syndrome coronavirus 2
  REGION 1..10: note = Table B: HLA-DQA1*01-B1*05L HLA-DQA1*05:01-B1*02:01L HLA-DQA1*03:01-B1*03:02L
NPNYEDLLIR

SEQ ID NO: 22856 - protein, 12 aa, Severe acute respiratory syndrome coronavirus 2
  REGION 1..12: note = Table B: HLA-DQA1*01-B1*05L HLA-DQA1*05:05-B1*03:19L HLA-DQA1*05:01-B1*02:01L
GTDLEGNFYGPF

SEQ ID NO: 22857 - protein, 12 aa, Severe acute respiratory syndrome coronavirus 2
  REGION 1..12: note = Table B: HLA-DQA1*01-B1*05L
TDLEGNFYGPFV

SEQ ID NO: 22858 - protein, 10 aa, Severe acute respiratory syndrome coronavirus 2
  REGION 1..10: note = Table B: HLA-DQA1*01-B1*05L
EGNFYGPFVD

SEQ ID NO: 22859 - protein, 10 aa, Severe acute respiratory syndrome coronavirus 2
  REGION 1..10: note = Table B: HLA-DQA1*01-B1*05L HLA-DQA1*03:01-B1*03:02L
NFYGPFVDRQ

SEQ ID NO: 22860 - protein, 10 aa, Severe acute respiratory syndrome coronavirus 2
  REGION 1..10: note = Table B: HLA-DQA1*01-B1*05L
FYGPFVDRQT

SEQ ID NO: 22861 - protein, 10 aa, Severe acute respiratory syndrome coronavirus 2
  REGION 1..10: note = Table B: HLA-DQA1*01-B1*05L
PFVDRQTAQA

SEQ ID NO: 22862 - protein, 11 aa, Severe acute respiratory syndrome coronavirus 2
  REGION 1..11: note = Table B: HLA-DQA1*01-B1*05L
TTLNDFNLVAM

SEQ ID NO: 22863 - protein, 10 aa, Severe acute respiratory syndrome coronavirus 2
  REGION 1..10: note = Table B: HLA-DQA1*01-B1*05L HLA-DQA1*03:01-B1*03:02L HLA-DPA1*01:02-B1*04:01L
LNDFNLVAMK

SEQ ID NO: 22864 - protein, 11 aa, Severe acute respiratory syndrome coronavirus 2
  REGION 1..11: note = Table B: HLA-DQA1*01-B1*05L
LVAMKYNYEPL

SEQ ID NO: 22865 - protein, 11 aa, Severe acute respiratory syndrome coronavirus 2
  REGION 1..11: note = Table B: HLA-DQA1*01-B1*05L
VAMKYNYEPLT

SEQ ID NO: 22866 - protein, 12 aa, Severe acute respiratory syndrome coronavirus 2
  REGION 1..12: note = Table B: HLA-DQA1*01-B1*05L
AMKYNYEPLTQD

SEQ ID NO: 22867 - protein, 11 aa, Severe acute respiratory syndrome coronavirus 2
  REGION 1..11: note = Table B: HLA-DQA1*01-B1*05L HLA-DQA1*03:01-B1*03:02L
TQDHVDILGPL

SEQ ID NO: 22868 - protein, 11 aa, Severe acute respiratory syndrome coronavirus 2
  REGION 1..11: note = Table B: HLA-DQA1*01-B1*05L HLA-DPA1*03:01-B1*105:01L
SALLEDEFTPF

SEQ ID NO: 22869 - protein, 10 aa, Severe acute respiratory syndrome coronavirus 2
  REGION 1..10: note = Table B: HLA-DQA1*01-B1*05L HLA-DQA1*05:01-B1*02:01L
LLEDEFTPFD

SEQ ID NO: 22870 - protein, 11 aa, Severe acute respiratory syndrome coronavirus 2
  REGION 1..11: note = Table B: HLA-DQA1*01-B1*05L HLA-DQA1*05:01-B1*02:01L HLA-DQA1*03:01-B1*03:02L
LEDEFTPFDVV

SEQ ID NO: 22871 - protein, 10 aa, Severe acute respiratory syndrome coronavirus 2
  REGION 1..10: note = Table B: HLA-DQA1*01-B1*05L HLA-DQA1*01:03-B1*06:01L
ENAFLPFAMG

SEQ ID NO: 22872 - protein, 12 aa, Severe acute respiratory syndrome coronavirus 2
  REGION 1..12: note = Table B: HLA-DQA1*01-B1*05L
TVAYFNMVYMPA

SEQ ID NO: 22873 - protein, 10 aa, Severe acute respiratory syndrome coronavirus 2
  REGION 1..10: note = Table B: HLA-DQA1*01-B1*05L
RIMTWLDMVD

SEQ ID NO: 22874 - protein, 10 aa, Severe acute respiratory syndrome coronavirus 2
  REGION 1..10: note = Table B: HLA-DQA1*01-B1*05L
IMTWLDMVDT

SEQ ID NO: 22875 - protein, 10 aa, Severe acute respiratory syndrome coronavirus 2
  REGION 1..10: note = Table B: HLA-DQA1*01-B1*05L HLA-DRB1*15:03L
YKVYYGNALD

SEQ ID NO: 22876 - protein, 10 aa, Severe acute respiratory syndrome coronavirus 2
  REGION 1..10: note = Table B: HLA-DQA1*01-B1*05L
VYDYLVSTQE

SEQ ID NO: 22877 - protein, 15 aa, Severe acute respiratory syndrome coronavirus 2
  REGION 1..15: note = Table B: HLA-DQA1*01-B1*05L HLA-DRB4*01:01L HLA-DPA1*01:03-B1*104:01L
LSVLQQLRVESSSKL

SEQ ID NO: 22878 - protein, 12 aa, Severe acute respiratory syndrome coronavirus 2
  REGION 1..12: note = Table B: HLA-DQA1*01-B1*05L HLA-DQA1*03:01-B1*03:02L
AQEAYEQAVANG

SEQ ID NO: 22879 - protein, 11 aa, Severe acute respiratory syndrome coronavirus 2
  REGION 1..11: note = Table B: HLA-DQA1*01-B1*05L
LNVAKSEFDRD

SEQ ID NO: 22880 - protein, 10 aa, Severe acute respiratory syndrome coronavirus 2
  REGION 1..10: note = Table B: HLA-DQA1*01-B1*05L
KLEKMADQAM

SEQ ID NO: 22881 - protein, 17 aa, Severe acute respiratory syndrome coronavirus 2
  REGION 1..17: note = Table B: HLA-DQA1*01-B1*05L HLA-DRB1*15:01L
ADQAMTQMYKQARSEDK

SEQ ID NO: 22882 - protein, 11 aa, Severe acute respiratory syndrome coronavirus 2
  REGION 1..11: note = Table B: HLA-DQA1*01-B1*05L
TMLRKLDNDAL

SEQ ID NO: 22883 - protein, 11 aa, Severe acute respiratory syndrome coronavirus 2
  REGION 1..11: note = Table B: HLA-DQA1*01-B1*05L
MLRKLDNDALN

SEQ ID NO: 22884 - protein, 12 aa, Severe acute respiratory syndrome coronavirus 2
  REGION 1..12: note = Table B: HLA-DQA1*01-B1*05L
RKLDNDALNNII

SEQ ID NO: 22885 - protein, 11 aa, Severe acute respiratory syndrome coronavirus 2
  REGION 1..11: note = Table B: HLA-DQA1*01-B1*05L HLA-DQA1*01:03-B1*06:01L HLA-DQA1*02:01-B1*03:03L
AKLMVVIPDYN

SEQ ID NO: 22886 - protein, 10 aa, Severe acute respiratory syndrome coronavirus 2
  REGION 1..10: note = Table B: HLA-DQA1*01-B1*05L
IPDYNTYKNT

SEQ ID NO: 22887 - protein, 13 aa, Severe acute respiratory syndrome coronavirus 2
  REGION 1..13: note = Table B: HLA-DQA1*01-B1*05L HLA-DQA1*05:01-B1*02:01L HLA-DPA1*01:03-B1*04:01L HLA-DRB1*15:03L
TTFTYASALWEIQ

SEQ ID NO: 22888 - protein, 13 aa, Severe acute respiratory syndrome coronavirus 2
  REGION 1..13: note = Table B: HLA-DQA1*01-B1*05L
YASALWEIQQVVD

SEQ ID NO: 22889 - protein, 16 aa, Severe acute respiratory syndrome coronavirus 2
  REGION 1..16: note = Table B: HLA-DQA1*01-B1*05L
VTALRANSAVKLQNNE

SEQ ID NO: 22890 - protein, 11 aa, Severe acute respiratory syndrome coronavirus 2
  REGION 1..11: note = Table B: HLA-DQA1*01-B1*05L HLA-DRB4*01:01L
NELSPVALRQM

SEQ ID NO: 22891 - protein, 12 aa, Severe acute respiratory syndrome coronavirus 2
  REGION 1..12: note = Table B: HLA-DQA1*01-B1*05L HLA-DQA1*05:01-B1*02:01L
TTQTACTDDNAL

SEQ ID NO: 22892 - protein, 10 aa, Severe acute respiratory syndrome coronavirus 2
  REGION 1..10: note = Table B: HLA-DQA1*01-B1*05L
ALAYYNTTKG

SEQ ID NO: 22893 - protein, 10 aa, Severe acute respiratory syndrome coronavirus 2
  REGION 1..10: note = Table B: HLA-DQA1*01-B1*05L
LAYYNTTKGG

SEQ ID NO: 22894 - protein, 10 aa, Severe acute respiratory syndrome coronavirus 2
  REGION 1..10: note = Table B: HLA-DQA1*01-B1*05L HLA-DQA1*01:03-B1*06:01L
DAAKAYKDYL

SEQ ID NO: 22895 - protein, 10 aa, Severe acute respiratory syndrome coronavirus 2
  REGION 1..10: note = Table B: HLA-DQA1*01-B1*05L
AKAYKDYLAS

SEQ ID NO: 22896 - protein, 10 aa, Severe acute respiratory syndrome coronavirus 2
  REGION 1..10: note = Table B: HLA-DQA1*01-B1*05L
KAYKDYLASG

SEQ ID NO: 22897 - protein, 12 aa, Severe acute respiratory syndrome coronavirus 2
  REGION 1..12: note = Table B: HLA-DQA1*01-B1*05L HLA-DQA1*03:01-B1*03:02L HLA-DQA1*02:01-B1*03:03L
AYKDYLASGGQP

SEQ ID NO: 22898 - protein, 10 aa, Severe acute respiratory syndrome coronavirus 2
  REGION 1..10: note = Table B: HLA-DQA1*01-B1*05L
AFDIYNDKVA

SEQ ID NO: 22899 - protein, 11 aa, Severe acute respiratory syndrome coronavirus 2
  REGION 1..11: note = Table B: HLA-DQA1*01-B1*05L
QEKDEDDNLID

SEQ ID NO: 22900 - protein, 11 aa, Severe acute respiratory syndrome coronavirus 2
  REGION 1..11: note = Table B: HLA-DQA1*01-B1*05L HLA-DPA1*01:02-B1*04:01L
DNLIDSYFVVK

SEQ ID NO: 22901 - protein, 10 aa, Severe acute respiratory syndrome coronavirus 2
  REGION 1..10: note = Table B: HLA-DQA1*01-B1*05L HLA-DQA1*03:01-B1*03:02L HLA-DQA1*01:03-B1*06:01L HLA-DQA1*02:01-B1*03:03L
TFSNYQHEET

SEQ ID NO: 22902 - protein, 12 aa, Severe acute respiratory syndrome coronavirus 2
  REGION 1..12: note = Table B: HLA-DQA1*01-B1*05L
HDFFKFRIDGDM

SEQ ID NO: 22903 - protein, 12 aa, Severe acute respiratory syndrome coronavirus 2
  REGION 1..12: note = Table B: HLA-DQA1*01-B1*05L HLA-DRB1*16:01L HLA-DRB1*15:03L
YALRHFDEGNCD

SEQ ID NO: 22904 - protein, 12 aa, Severe acute respiratory syndrome coronavirus 2
  REGION 1..12: note = Table B: HLA-DQA1*01-B1*05L
LRHFDEGNCDTL

SEQ ID NO: 22905 - protein, 13 aa, Severe acute respiratory syndrome coronavirus 2
  REGION 1..13: note = Table B: HLA-DQA1*01-B1*05L
KEILVTYNCCDDD

SEQ ID NO: 22906 - protein, 12 aa, Severe acute respiratory syndrome coronavirus 2
  REGION 1..12: note = Table B: HLA-DQA1*01-B1*05L
VTYNCCDDDYFN

SEQ ID NO: 22907 - protein, 12 aa, Severe acute respiratory syndrome coronavirus 2
  REGION 1..12: note = Table B: HLA-DQA1*01-B1*05L
YFNKKDWYDFVE

SEQ ID NO: 22908 - protein, 12 aa, Severe acute respiratory syndrome coronavirus 2
  REGION 1..12: note = Table B: HLA-DQA1*01-B1*05L
FNKKDWYDFVEN

SEQ ID NO: 22909 - protein, 12 aa, Severe acute respiratory syndrome coronavirus 2
  REGION 1..12: note = Table B: HLA-DQA1*01-B1*05L
NKKDWYDFVENP

SEQ ID NO: 22910 - protein, 10 aa, Severe acute respiratory syndrome coronavirus 2
  REGION 1..10: note = Table B: HLA-DQA1*01-B1*05L
DWYDFVENPD

SEQ ID NO: 22911 - protein, 13 aa, Severe acute respiratory syndrome coronavirus 2
  REGION 1..13: note = Table B: HLA-DQA1*01-B1*05L HLA-DQA1*01:03-B1*06:01L
DNQDLNGNWYDFG

SEQ ID NO: 22912 - protein, 13 aa, Severe acute respiratory syndrome coronavirus 2
  REGION 1..13: note = Table B: HLA-DQA1*01-B1*05L
NQDLNGNWYDFGD

SEQ ID NO: 22913 - protein, 12 aa, Severe acute respiratory syndrome coronavirus 2
  REGION 1..12: note = Table B: HLA-DQA1*01-B1*05L
DLNGNWYDFGDF

SEQ ID NO: 22914 - protein, 12 aa, Severe acute respiratory syndrome coronavirus 2
  REGION 1..12: note = Table B: HLA-DQA1*01-B1*05L
LNGNWYDFGDFI

SEQ ID NO: 22915 - protein, 10 aa, Severe acute respiratory syndrome coronavirus 2
  REGION 1..10: note = Table B: HLA-DQA1*01-B1*05L
NWYDFGDFIQ

SEQ ID NO: 22916 - protein, 13 aa, Severe acute respiratory syndrome coronavirus 2
  REGION 1..13: note = Table B: HLA-DQA1*01-B1*05L HLA-DRB1*15:03L
VPVVDSYYSLLMP

SEQ ID NO: 22917 - protein, 17 aa, Severe acute respiratory syndrome coronavirus 2
  REGION 1..17: note = Table B: HLA-DQA1*01-B1*05L HLA-DRB4*01:01L HLA-DRB1*09:01L
MPILTLTRALTAESHVD

SEQ ID NO: 22918 - protein, 10 aa, Severe acute respiratory syndrome coronavirus 2
  REGION 1..10: note = Table B: HLA-DQA1*01-B1*05L
AESHVDTDLT

SEQ ID NO: 22919 - protein, 13 aa, Severe acute respiratory syndrome coronavirus 2
  REGION 1..13: note = Table B: HLA-DQA1*01-B1*05L
IKWDLLKYDFTEE

SEQ ID NO: 22920 - protein, 10 aa, Severe acute respiratory syndrome coronavirus 2
  REGION 1..10: note = Table B: HLA-DQA1*01-B1*05L HLA-DQA1*03:01-B1*03:02L
LKYDFTEERL

SEQ ID NO: 22921 - protein, 10 aa, Severe acute respiratory syndrome coronavirus 2
  REGION 1..10: note = Table B: HLA-DQA1*01-B1*05L HLA-DPA1*03:01-B1*105:01L HLA-DQA1*03:01-B1*03:02L HLA-DPA1*01:02-B1*04:01L HLA-DRB1*16:01L HLA-DQA1*02:01-B1*03:03L
KYWDQTYHPN

SEQ ID NO: 22922 - protein, 13 aa, Severe acute respiratory syndrome coronavirus 2
  REGION 1..13: note = Table B: HLA-DQA1*01-B1*05L HLA-DRB1*16:01L
GPLVRKIFVDGVP

SEQ ID NO: 22923 - protein, 10 aa, Severe acute respiratory syndrome coronavirus 2
  REGION 1..10: note = Table B: HLA-DQA1*01-B1*05L
LLVYAADPAM

SEQ ID NO: 22924 - protein, 11 aa, Severe acute respiratory syndrome coronavirus 2
  REGION 1..11: note = Table B: HLA-DQA1*01-B1*05L
KPGNFNKDFYD

SEQ ID NO: 22925 - protein, 10 aa, Severe acute respiratory syndrome coronavirus 2
  REGION 1..10: note = Table B: HLA-DQA1*01-B1*05L
NKDFYDFAVS

SEQ ID NO: 22926 - protein, 10 aa, Severe acute respiratory syndrome coronavirus 2
  REGION 1..10: note = Table B: HLA-DQA1*01-B1*05L HLA-DQA1*03:01-B1*03:02L HLA-DQA1*02:01-B1*03:03L
DFYDFAVSKG

SEQ ID NO: 22927 - protein, 13 aa, Severe acute respiratory syndrome coronavirus 2
  REGION 1..13: note = Table B: HLA-DQA1*01-B1*05L HLA-DPA1*03:01-B1*105:01L
FAVSKGFFKEGSS

SEQ ID NO: 22928 - protein, 10 aa, Severe acute respiratory syndrome coronavirus 2
  REGION 1..10: note = Table B: HLA-DQA1*01-B1*05L HLA-DQA1*03:01-B1*03:02L
GFFKEGSSVE

SEQ ID NO: 22929 - protein, 12 aa, Severe acute respiratory syndrome coronavirus 2
  REGION 1..12: note = Table B: HLA-DQA1*01-B1*05L
LKHFFFAQDGNA

SEQ ID NO: 22930 - protein, 12 aa, Severe acute respiratory syndrome coronavirus 2
  REGION 1..12: note = Table B: HLA-DQA1*01-B1*05L
DGNAAISDYDYY

SEQ ID NO: 22931 - protein, 11 aa, Severe acute respiratory syndrome coronavirus 2
  REGION 1..11: note = Table B: HLA-DQA1*01-B1*05L
NAAISDYDYYR

SEQ ID NO: 22932 - protein, 10 aa, Severe acute respiratory syndrome coronavirus 2
  REGION 1..10: note = Table B: HLA-DQA1*01-B1*05L
ISDYDYYRYN

SEQ ID NO: 22933 - protein, 12 aa, Severe acute respiratory syndrome coronavirus 2
  REGION 1..12: note = Table B: HLA-DQA1*01-B1*05L
SDYDYYRYNLPT

SEQ ID NO: 22934 - protein, 12 aa, Severe acute respiratory syndrome coronavirus 2
  REGION 1..12: note = Table B: HLA-DQA1*01-B1*05L HLA-DPA1*03:01-B1*105:01L HLA-DPA1*01:02-B1*04:01L
VVDKYFDCYDGG

SEQ ID NO: 22935 - protein, 12 aa, Severe acute respiratory syndrome coronavirus 2
  REGION 1..12: note = Table B: HLA-DQA1*01-B1*05L
WGKARLYYDSMS

SEQ ID NO: 22936 - protein, 11 aa, Severe acute respiratory syndrome coronavirus 2
  REGION 1..11: note = Table B: HLA-DQA1*01-B1*05L
ARLYYDSMSYE

SEQ ID NO: 22937 - protein, 11 aa, Severe acute respiratory syndrome coronavirus 2
  REGION 1..11: note = Table B: HLA-DQA1*01-B1*05L
RLYYDSMSYED

SEQ ID NO: 22938 - protein, 11 aa, Severe acute respiratory syndrome coronavirus 2
  REGION 1..11: note = Table B: HLA-DQA1*01-B1*05L
LYYDSMSYEDQ

SEQ ID NO: 22939 - protein, 11 aa, Severe acute respiratory syndrome coronavirus 2
  REGION 1..11: note = Table B: HLA-DQA1*01-B1*05L
YYDSMSYEDQD

SEQ ID NO: 22940 - protein, 10 aa, Severe acute respiratory syndrome coronavirus 2
  REGION 1..10: note = Table B: HLA-DQA1*01-B1*05L
DSMSYEDQDA

SEQ ID NO: 22941 - protein, 10 aa, Severe acute respiratory syndrome coronavirus 2
  REGION 1..10: note = Table B: HLA-DQA1*01-B1*05L
SYEDQDALFA

SEQ ID NO: 22942 - protein, 16 aa, Severe acute respiratory syndrome coronavirus 2
  REGION 1..16: note = Table B: HLA-DQA1*01-B1*05L
DQDALFAYTKRNVIPT

SEQ ID NO: 22943 - protein, 16 aa, Severe acute respiratory syndrome coronavirus 2
  REGION 1..16: note = Table B: HLA-DQA1*01-B1*05L
DALFAYTKRNVIPTIT

SEQ ID NO: 22944 - protein, 13 aa, Severe acute respiratory syndrome coronavirus 2
  REGION 1..13: note = Table B: HLA-DQA1*01-B1*05L HLA-DRB1*16:01L HLA-DRB1*15:03L
IGTSKFYGGWHNM

SEQ ID NO: 22945 - protein, 10 aa, Severe acute respiratory syndrome coronavirus 2
  REGION 1..10: note = Table B: HLA-DQA1*01-B1*05L
MLKTVYSDVE

SEQ ID NO: 22946 - protein, 10 aa, Severe acute respiratory syndrome coronavirus 2
  REGION 1..10: note = Table B: HLA-DQA1*01-B1*05L
KTVYSDVENP

SEQ ID NO: 22947 - protein, 10 aa, Severe acute respiratory syndrome coronavirus 2
  REGION 1..10: note = Table B: HLA-DQA1*01-B1*05L
SDVENPHLMG

SEQ ID NO: 22948 - protein, 12 aa, Severe acute respiratory syndrome coronavirus 2
  REGION 1..12: note = Table B: HLA-DQA1*01-B1*05L
GDATTAYANSVF

SEQ ID NO: 22949 - protein, 10 aa, Severe acute respiratory syndrome coronavirus 2
  REGION 1..10: note = Table B: HLA-DQA1*01-B1*05L
NRDVDTDFVN

SEQ ID NO: 22950 - protein, 10 aa, Severe acute respiratory syndrome coronavirus 2
  REGION 1..10: note = Table B: HLA-DQA1*01-B1*05L
RDVDTDFVNE

SEQ ID NO: 22951 - protein, 13 aa, Severe acute respiratory syndrome coronavirus 2
  REGION 1..13: note = Table B: HLA-DQA1*01-B1*05L HLA-DPA1*03:01-B1*105:01L
KHFSMMILSDDAV

SEQ ID NO: 22952 - protein, 13 aa, Severe acute respiratory syndrome coronavirus 2
  REGION 1..13: note = Table B: HLA-DQA1*01-B1*05L HLA-DQA1*05:01-B1*02:01L
HFSMMILSDDAVV

SEQ ID NO: 22953 - protein, 13 aa, Severe acute respiratory syndrome coronavirus 2
  REGION 1..13: note = Table B: HLA-DQA1*01-B1*05L HLA-DQA1*05:01-B1*02:01L
FNSTYASQGLVAS

SEQ ID NO: 22954 - protein, 10 aa, Severe acute respiratory syndrome coronavirus 2
  REGION 1..10: note = Table B: HLA-DQA1*01-B1*05L HLA-DRB1*16:01L HLA-DRB1*15:03L
VLYYQNNVFM

SEQ ID NO: 22955 - protein, 12 aa, Severe acute respiratory syndrome coronavirus 2
  REGION 1..12: note = Table B: HLA-DQA1*01-B1*05L
SEAKCWTETDLT

SEQ ID NO: 22956 - protein, 10 aa, Severe acute respiratory syndrome coronavirus 2
  REGION 1..10: note = Table B: HLA-DQA1*01-B1*05L
DYVYLPYPDP

SEQ ID NO: 22957 - protein, 10 aa, Severe acute respiratory syndrome coronavirus 2
  REGION 1..10: note = Table B: HLA-DQA1*01-B1*05L HLA-DQA1*01:03-B1*06:01L
AGCFVDDIVK

SEQ ID NO: 22958 - protein, 11 aa, Severe acute respiratory syndrome coronavirus 2
  REGION 1..11: note = Table B: HLA-DQA1*01-B1*05L HLA-DRB1*15:03L
MIERFVSLAID

SEQ ID NO: 22959 - protein, 13 aa, Severe acute respiratory syndrome coronavirus 2
  REGION 1..13: note = Table B: HLA-DQA1*01-B1*05L
RFVSLAIDAYPLT

SEQ ID NO: 22960 - protein, 10 aa, Severe acute respiratory syndrome coronavirus 2
  REGION 1..10: note = Table B: HLA-DQA1*01-B1*05L HLA-DQA1*03:01-B1*03:02L
PNQEYADVFH

SEQ ID NO: 22961 - protein, 11 aa, Severe acute respiratory syndrome coronavirus 2
  REGION 1..11: note = Table B: HLA-DQA1*01-B1*05L
NTSRYWEPEFY

SEQ ID NO: 22962 - protein, 10 aa, Severe acute respiratory syndrome coronavirus 2
  REGION 1..10: note = Table B: HLA-DQA1*01-B1*05L
SRYWEPEFYE

SEQ ID NO: 22963 - protein, 13 aa, Severe acute respiratory syndrome coronavirus 2
  REGION 1..13: note = Table B: HLA-DQA1*01-B1*05L
APGCDVTDVTQLY

SEQ ID NO: 22964 - protein, 12 aa, Severe acute respiratory syndrome coronavirus 2
  REGION 1..12: note = Table B: HLA-DQA1*01-B1*05L HLA-DQA1*05:01-B1*02:01L
VGSDNVTDFNAI

SEQ ID NO: 22965 - protein, 12 aa, Severe acute respiratory syndrome coronavirus 2
  REGION 1..12: note = Table B: HLA-DQA1*01-B1*05L HLA-DQA1*05:01-B1*02:01L
GSDNVTDFNAIA

SEQ ID NO: 22966 - protein, 11 aa, Severe acute respiratory syndrome coronavirus 2
  REGION 1..11: note = Table B: HLA-DQA1*01-B1*05L
DNVTDFNAIAT

SEQ ID NO: 22967 - protein, 13 aa, Severe acute respiratory syndrome coronavirus 2
  REGION 1..13: note = Table B: HLA-DQA1*01-B1*05L HLA-DQA1*05:05-B1*03:19L HLA-DQA1*05:01-B1*02:01L
AIATCDWTNAGDY

SEQ ID NO: 22968 - protein, 11 aa, Severe acute respiratory syndrome coronavirus 2
  REGION 1..11: note = Table B: HLA-DQA1*01-B1*05L
ERLKLFAAETL

SEQ ID NO: 22969 - protein, 11 aa, Severe acute respiratory syndrome coronavirus 2
  REGION 1..11: note = Table B: HLA-DQA1*01-B1*05L HLA-DQA1*05:01-B1*02:01L HLA-DQA1*01:03-B1*06:01L
AAETLKATEET

SEQ ID NO: 22970 - protein, 10 aa, Severe acute respiratory syndrome coronavirus 2
  REGION 1..10: note = Table B: HLA-DQA1*01-B1*05L
VREVLSDREL

SEQ ID NO: 22971 - protein, 10 aa, Severe acute respiratory syndrome coronavirus 2
  REGION 1..10: note = Table B: HLA-DQA1*01-B1*05L HLA-DQA1*03:01-B1*03:02L
EYTFEKGDYG

SEQ ID NO: 22972 - protein, 10 aa, Severe acute respiratory syndrome coronavirus 2
  REGION 1..10: note = Table B: HLA-DQA1*01-B1*05L
TFEKGDYGDA

SEQ ID NO: 22973 - protein, 11 aa, Severe acute respiratory syndrome coronavirus 2
  REGION 1..11: note = Table B: HLA-DQA1*01-B1*05L HLA-DQA1*05:01-B1*02:01L
FEKGDYGDAVV

SEQ ID NO: 22974 - protein, 11 aa, Severe acute respiratory syndrome coronavirus 2
  REGION 1..11: note = Table B: HLA-DQA1*01-B1*05L HLA-DPA1*03:01-B1*105:01L HLA-DQA1*03:01-B1*03:02L HLA-DQA1*01:03-B1*06:01L
VGDYFVLTSHT

SEQ ID NO: 22975 - protein, 12 aa, Severe acute respiratory syndrome coronavirus 2
  REGION 1..12: note = Table B: HLA-DQA1*01-B1*05L HLA-DRB1*15:03L
IGLALYYPSARI

SEQ ID NO: 22976 - protein, 14 aa, Severe acute respiratory syndrome coronavirus 2
  REGION 1..14: note = Table B: HLA-DQA1*01-B1*05L HLA-DRB1*16:01L
VNSTLEQYVFCTVN

SEQ ID NO: 22977 - protein, 10 aa, Severe acute respiratory syndrome coronavirus 2
  REGION 1..10: note = Table B: HLA-DQA1*01-B1*05L HLA-DQA1*05:01-B1*02:01L HLA-DRB1*15:03L
DIVVFDEISM

SEQ ID NO: 22978 - protein, 10 aa, Severe acute respiratory syndrome coronavirus 2
  REGION 1..10: note = Table B: HLA-DQA1*01-B1*05L HLA-DRB1*15:03L
IVVFDEISMA

SEQ ID NO: 22979 - protein, 12 aa, Severe acute respiratory syndrome coronavirus 2
  REGION 1..12: note = Table B: HLA-DQA1*01-B1*05L HLA-DRB1*15:03L
ISMATNYDLSVV

SEQ ID NO: 22980 - protein, 12 aa, Severe acute respiratory syndrome coronavirus 2
  REGION 1..12: note = Table B: HLA-DQA1*01-B1*05L HLA-DQA1*05:01-B1*02:01L HLA-DQA1*03:01-B1*03:02L
SMATNYDLSVVN

SEQ ID NO: 22981 - protein, 11 aa, Severe acute respiratory syndrome coronavirus 2
  REGION 1..11: note = Table B: HLA-DQA1*01-B1*05L HLA-DQA1*01:03-B1*06:01L
TKGTLEPEYFN

SEQ ID NO: 22982 - protein, 13 aa, Severe acute respiratory syndrome coronavirus 2
  REGION 1..13: note = Table B: HLA-DQA1*01-B1*05L
VASKILGLPTQTV

SEQ ID NO: 22983 - protein, 12 aa, Severe acute respiratory syndrome coronavirus 2
  REGION 1..12: note = Table B: HLA-DQA1*01-B1*05L HLA-DQA1*01:03-B1*06:01L
VDSSQGSEYDYV

SEQ ID NO: 22984 - protein, 12 aa, Severe acute respiratory syndrome coronavirus 2
  REGION 1..12: note = Table B: HLA-DQA1*01-B1*05L
SQGSEYDYVIFT

SEQ ID NO: 22985 - protein, 12 aa, Severe acute respiratory syndrome coronavirus 2
  REGION 1..12: note = Table B: HLA-DQA1*01-B1*05L HLA-DPA1*01:03-B1*04:01L HLA-DPA1*01:03-B1*04:02L HLA-DPA1*03:01-B1*105:01L
SEYDYVIFTQTT

SEQ ID NO: 22986 - protein, 13 aa, Severe acute respiratory syndrome coronavirus 2
  REGION 1..13: note = Table B: HLA-DQA1*01-B1*05L HLA-DRB1*15:03L
VGILCIMSDRDLY

SEQ ID NO: 22987 - protein, 12 aa, Severe acute respiratory syndrome coronavirus 2
  REGION 1..12: note = Table B: HLA-DQA1*01-B1*05L HLA-DRB1*15:03L
ILCIMSDRDLYD

SEQ ID NO: 22988 - protein, 12 aa, Severe acute respiratory syndrome coronavirus 2
  REGION 1..12: note = Table B: HLA-DQA1*01-B1*05L
YDKLQFTSLEIP

SEQ ID NO: 22989 - protein, 10 aa, Severe acute respiratory syndrome coronavirus 2
  REGION 1..10: note = Table B: HLA-DQA1*01-B1*05L
VNGYPNMFIT

SEQ ID NO: 22990 - protein, 10 aa, Severe acute respiratory syndrome coronavirus 2
  REGION 1..10: note = Table B: HLA-DQA1*01-B1*05L HLA-DRB1*15:03L
VRAWIGFDVE

SEQ ID NO: 22991 - protein, 10 aa, Severe acute respiratory syndrome coronavirus 2
  REGION 1..10: note = Table B: HLA-DQA1*01-B1*05L
RAWIGFDVEG

SEQ ID NO: 22992 - protein, 10 aa, Severe acute respiratory syndrome coronavirus 2
  REGION 1..10: note = Table B: HLA-DQA1*01-B1*05L
VPTGYVDTPN

SEQ ID NO: 22993 - protein, 10 aa, Severe acute respiratory syndrome coronavirus 2
  REGION 1..10: note = Table B: HLA-DQA1*01-B1*05L
PTGYVDTPNN

SEQ ID NO: 22994 - protein, 11 aa, Severe acute respiratory syndrome coronavirus 2
  REGION 1..11: note = Table B: HLA-DQA1*01-B1*05L
IKIVQMLSDTL

SEQ ID NO: 22995 - protein, 12 aa, Severe acute respiratory syndrome coronavirus 2
  REGION 1..12: note = Table B: HLA-DQA1*01-B1*05L
HHSIGFDYVYNP

SEQ ID NO: 22996 - protein, 10 aa, Severe acute respiratory syndrome coronavirus 2
  REGION 1..10: note = Table B: HLA-DQA1*01-B1*05L
YNPFMIDVQQ

SEQ ID NO: 22997 - protein, 12 aa, Severe acute respiratory syndrome coronavirus 2
  REGION 1..12: note = Table B: HLA-DQA1*01-B1*05L HLA-DQA1*05:01-B1*02:01L HLA-DQA1*03:01-B1*03:02L
IDVQQWGFTGNL

SEQ ID NO: 22998 - protein, 11 aa, Severe acute respiratory syndrome coronavirus 2
  REGION 1..11: note = Table B: HLA-DQA1*01-B1*05L
VQQWGFTGNLQ

SEQ ID NO: 22999 - protein, 10 aa, Severe acute respiratory syndrome coronavirus 2
  REGION 1..10: note = Table B: HLA-DQA1*01-B1*05L HLA-DQA1*03:01-B1*03:02L
EYPIIGDELK

SEQ ID NO: 23000 - protein, 13 aa, Severe acute respiratory syndrome coronavirus 2
  REGION 1..13: note = Table B: HLA-DQA1*01-B1*05L HLA-DQA1*03:01-B1*03:02L
ADKFPVLHDIGNP

SEQ ID NO: 23001 - protein, 11 aa, Severe acute respiratory syndrome coronavirus 2
  REGION 1..11: note = Table B: HLA-DQA1*01-B1*05L
VPQADVEWKFY

SEQ ID NO: 23002 - protein, 12 aa, Severe acute respiratory syndrome coronavirus 2
  REGION 1..12: note = Table B: HLA-DQA1*01-B1*05L
DVEWKFYDAQPC

SEQ ID NO: 23003 - protein, 12 aa, Severe acute respiratory syndrome coronavirus 2
  REGION 1..12: note = Table B: HLA-DQA1*01-B1*05L HLA-DPA1*01:02-B1*04:01L
KIEELFYSYATH

SEQ ID NO: 23004 - protein, 12 aa, Severe acute respiratory syndrome coronavirus 2
  REGION 1..12: note = Table B: HLA-DQA1*01-B1*05L
IEELFYSYATHS

SEQ ID NO: 23005 - protein, 11 aa, Severe acute respiratory syndrome coronavirus 2
  REGION 1..11: note = Table B: HLA-DQA1*01-B1*05L HLA-DQA1*03:01-B1*03:02L
ELFYSYATHSD

SEQ ID NO: 23006 - protein, 11 aa, Severe acute respiratory syndrome coronavirus 2
  REGION 1..11: note = Table B: HLA-DQA1*01-B1*05L HLA-DQA1*03:01-B1*03:02L
YSYATHSDKFT

SEQ ID NO: 23007 - protein, 10 aa, Severe acute respiratory syndrome coronavirus 2
  REGION 1..10: note = Table B: HLA-DQA1*01-B1*05L HLA-DRB1*16:01L
FHTPAFDKSA

SEQ ID NO: 23008 - protein, 10 aa, Severe acute respiratory syndrome coronavirus 2
  REGION 1..10: note = Table B: HLA-DQA1*01-B1*05L
TPAFDKSAFV

SEQ ID NO: 23009 - protein, 13 aa, Severe acute respiratory syndrome coronavirus 2
  REGION 1..13: note = Table B: HLA-DQA1*01-B1*05L
KQLPFFYYSDSPC

SEQ ID NO: 23010 - protein, 11 aa, Severe acute respiratory syndrome coronavirus 2
  REGION 1..11: note = Table B: HLA-DQA1*01-B1*05L
PFFYYSDSPCE

SEQ ID NO: 23011 - protein, 12 aa, Severe acute respiratory syndrome coronavirus 2
  REGION 1..12: note = Table B: HLA-DQA1*01-B1*05L
GKQVVSDIDYVP

SEQ ID NO: 23012 - protein, 10 aa, Severe acute respiratory syndrome coronavirus 2
  REGION 1..10: note = Table B: HLA-DQA1*01-B1*05L
EYRLYLDAYN

SEQ ID NO: 23013 - protein, 10 aa, Severe acute respiratory syndrome coronavirus 2
  REGION 1..10: note = Table B: HLA-DQA1*01-B1*05L
YRLYLDAYNM

SEQ ID NO: 23014 - protein, 11 aa, Severe acute respiratory syndrome coronavirus 2
  REGION 1..11: note = Table B: HLA-DQA1*01-B1*05L HLA-DPA1*01:02-B1*04:01L
FSLWVYKQFDT

SEQ ID NO: 23015 - protein, 10 aa, Severe acute respiratory syndrome coronavirus 2
  REGION 1..10: note = Table B: HLA-DQA1*01-B1*05L HLA-DPA1*02:01-B1*13:01L HLA-DPA1*01:02-B1*04:01L HLA-DRB1*16:01L HLA-DQA1*01:03-B1*06:01L HLA-DQA1*02:01-B1*03:03L HLA-DRB1*15:03L
VYKQFDTYNL

SEQ ID NO: 23016 - protein, 11 aa, Severe acute respiratory syndrome coronavirus 2
  REGION 1..11: note = Table B: HLA-DQA1*01-B1*05L HLA-DRB1*16:01L
YKQFDTYNLWN

SEQ ID NO: 23017 - protein, 11 aa, Severe acute respiratory syndrome coronavirus 2
  REGION 1..11: note = Table B: HLA-DQA1*01-B1*05L
KQFDTYNLWNT

SEQ ID NO: 23018 - protein, 11 aa, Severe acute respiratory syndrome coronavirus 2
  REGION 1..11: note = Table B: HLA-DQA1*01-B1*05L HLA-DPA1*01:02-B1*04:01L
GVDVELFENKT

SEQ ID NO: 23019 - protein, 10 aa, Severe acute respiratory syndrome coronavirus 2
  REGION 1..10: note = Table B: HLA-DQA1*01-B1*05L
DVELFENKTT

SEQ ID NO: 23020 - protein, 11 aa, Severe acute respiratory syndrome coronavirus 2
  REGION 1..11: note = Table B: HLA-DQA1*01-B1*05L
APLTVFFDGRV

SEQ ID NO: 23021 - protein, 10 aa, Severe acute respiratory syndrome coronavirus 2
  REGION 1..10: note = Table B: HLA-DQA1*01-B1*05L
LTVFFDGRVD

SEQ ID NO: 23022 - protein, 10 aa, Severe acute respiratory syndrome coronavirus 2
  REGION 1..10: note = Table B: HLA-DQA1*01-B1*05L HLA-DQA1*03:01-B1*03:02L
TVFFDGRVDG

SEQ ID NO: 23023 - protein, 10 aa, Severe acute respiratory syndrome coronavirus 2
  REGION 1..10: note = Table B: HLA-DQA1*01-B1*05L
VFFDGRVDGQ

SEQ ID NO: 23024 - protein, 10 aa, Severe acute respiratory syndrome coronavirus 2
  REGION 1..10: note = Table B: HLA-DQA1*01-B1*05L HLA-DQA1*03:01-B1*03:02L
DGRVDGQVDL

SEQ ID NO: 23025 - protein, 11 aa, Severe acute respiratory syndrome coronavirus 2
  REGION 1..11: note = Table B: HLA-DQA1*01-B1*05L HLA-DQA1*03:01-B1*03:02L HLA-DQA1*02:01-B1*03:03L
LPETYFTQSRN

SEQ ID NO: 23026 - protein, 11 aa, Severe acute respiratory syndrome coronavirus 2
  REGION 1..11: note = Table B: HLA-DQA1*01-B1*05L
KPRSQMEIDFL

SEQ ID NO: 23027 - protein, 14 aa, Severe acute respiratory syndrome coronavirus 2
  REGION 1..14: note = Table B: HLA-DQA1*01-B1*05L HLA-DQA1*05:01-B1*02:01L HLA-DPA1*03:01-B1*105:01L
SQMEIDFLELAMDE

SEQ ID NO: 23028 - protein, 11 aa, Severe acute respiratory syndrome coronavirus 2
  REGION 1..11: note = Table B: HLA-DQA1*01-B1*05L
FEHIVYGDFSH

SEQ ID NO: 23029 - protein, 11 aa, Severe acute respiratory syndrome coronavirus 2
  REGION 1..11: note = Table B: HLA-DQA1*01-B1*05L HLA-DPA1*01:02-B1*04:01L
EHIVYGDFSHS

SEQ ID NO: 23030 - protein, 11 aa, Severe acute respiratory syndrome coronavirus 2
  REGION 1..11: note = Table B: HLA-DQA1*01-B1*05L HLA-DPA1*01:03-B1*04:02L HLA-DRB1*16:01L HLA-DQA1*01:03-B1*06:01L HLA-DRB1*04:08L
PFELEDFIPMD

SEQ ID NO: 23031 - protein, 11 aa, Severe acute respiratory syndrome coronavirus 2
  REGION 1..11: note = Table B: HLA-DQA1*01-B1*05L
ELEDFIPMDST

SEQ ID NO: 23032 - protein, 12 aa, Severe acute respiratory syndrome coronavirus 2
  REGION 1..12: note = Table B: HLA-DQA1*01-B1*05L HLA-DQA1*03:01-B1*03:02L HLA-DQA1*01:03-B1*06:01L HLA-DQA1*02:01-B1*03:03L
STVKNYFITDAQ

SEQ ID NO: 23033 - protein, 12 aa, Severe acute respiratory syndrome coronavirus 2
  REGION 1..12: note = Table B: HLA-DQA1*01-B1*05L
TVKNYFITDAQT

SEQ ID NO: 23034 - protein, 10 aa, Severe acute respiratory syndrome coronavirus 2
  REGION 1..10: note = Table B: HLA-DQA1*01-B1*05L
NYFITDAQTG

SEQ ID NO: 23035 - protein, 11 aa, Severe acute respiratory syndrome coronavirus 2
  REGION 1..11: note = Table B: HLA-DQA1*01-B1*05L
VIDLLLDDFVE

SEQ ID NO: 23036 - protein, 11 aa, Severe acute respiratory syndrome coronavirus 2
  REGION 1..11: note = Table B: HLA-DQA1*01-B1*05L HLA-DPA1*01:02-B1*04:01L
GHVETFYPKLQ

SEQ ID NO: 23037 - protein, 10 aa, Severe acute respiratory syndrome coronavirus 2
  REGION 1..10: note = Table B: HLA-DQA1*01-B1*05L
DLQNYGDSAT

SEQ ID NO: 23038 - protein, 10 aa, Severe acute respiratory syndrome coronavirus 2
  REGION 1..10: note = Table B: HLA-DQA1*01-B1*05L
LQNYGDSATL

SEQ ID NO: 23039 - protein, 10 aa, Severe acute respiratory syndrome coronavirus 2
  REGION 1..10: note = Table B: HLA-DQA1*01-B1*05L
LRQWLPTGTL

SEQ ID NO: 23040 - protein, 12 aa, Severe acute respiratory syndrome coronavirus 2
  REGION 1..12: note = Table B: HLA-DQA1*01-B1*05L HLA-DQA1*05:01-B1*02:01L
LVDSDLNDFVSD

SEQ ID NO: 23041 - protein, 11 aa, Severe acute respiratory syndrome coronavirus 2
  REGION 1..11: note = Table B: HLA-DQA1*01-B1*05L
SDLNDFVSDAD

SEQ ID NO: 23042 - protein, 11 aa, Severe acute respiratory syndrome coronavirus 2
  REGION 1..11: note = Table B: HLA-DQA1*01-B1*05L
DLNDFVSDADS

SEQ ID NO: 23043 - protein, 11 aa, Severe acute respiratory syndrome coronavirus 2
  REGION 1..11: note = Table B: HLA-DQA1*01-B1*05L
LNDFVSDADST

SEQ ID NO: 23044 - protein, 12 aa, Severe acute respiratory syndrome coronavirus 2
  REGION 1..12: note = Table B: HLA-DQA1*01-B1*05L
TANKWDLIISDM

SEQ ID NO: 23045 - protein, 10 aa, Severe acute respiratory syndrome coronavirus 2
  REGION 1..10: note = Table B: HLA-DQA1*01-B1*05L HLA-DPA1*01:03-B1*04:02L HLA-DPA1*03:01-B1*105:01L HLA-DQA1*03:01-B1*03:02L HLA-DPA1*01:02-B1*04:01L HLA-DQA1*01:03-B1*06:01L HLA-DQA1*02:01-B1*03:03L
SSYSLFDMSK

SEQ ID NO: 23046 - protein, 12 aa, Severe acute respiratory syndrome coronavirus 2
  REGION 1..12: note = Table B: HLA-DQA1*01-B1*05L
SYSLFDMSKFPL

SEQ ID NO: 23047 - protein, 12 aa, Severe acute respiratory syndrome coronavirus 2
  REGION 1..12: note = Table B: HLA-DQA1*01-B1*05L HLA-DPA1*01:03-B1*04:02L HLA-DPA1*02:01-B1*13:01L
YSLFDMSKFPLK

SEQ ID NO: 23048 - protein, 12 aa, Severe acute respiratory syndrome coronavirus 2
  REGION 1..12: note = Table B: HLA-DQA1*01-B1*05L
FTRGVYYPDKVF

SEQ ID NO: 23049 - protein, 10 aa, Severe acute respiratory syndrome coronavirus 2
  REGION 1..10: note = Table B: HLA-DQA1*01-B1*05L
VYYPDKVFRS

SEQ ID NO: 23050 - protein, 11 aa, Severe acute respiratory syndrome coronavirus 2
  REGION 1..11: note = Table B: HLA-DQA1*01-B1*05L
VLHSTQDLFLP

SEQ ID NO: 23051 - protein, 12 aa, Severe acute respiratory syndrome coronavirus 2
  REGION 1..12: note = Table B: HLA-DQA1*01-B1*05L
STQDLFLPFFSN

SEQ ID NO: 23052 - protein, 11 aa, Severe acute respiratory syndrome coronavirus 2
  REGION 1..11: note = Table B: HLA-DQA1*01-B1*05L
DLFLPFFSNVT

SEQ ID NO: 23053 - protein, 10 aa, Severe acute respiratory syndrome coronavirus 2
  REGION 1..10: note = Table B: HLA-DQA1*01-B1*05L HLA-DRB1*16:01L HLA-DRB1*15:03L
VTWFHAIHVS

SEQ ID NO: 23054 - protein, 12 aa, Severe acute respiratory syndrome coronavirus 2
  REGION 1..12: note = Table B: HLA-DQA1*01-B1*05L
NGTKRFDNPVLP

SEQ ID NO: 23055 - protein, 12 aa, Severe acute respiratory syndrome coronavirus 2
  REGION 1..12: note = Table B: HLA-DQA1*01-B1*05L
TKRFDNPVLPFN

SEQ ID NO: 23056 - protein, 10 aa, Severe acute respiratory syndrome coronavirus 2
  REGION 1..10: note = Table B: HLA-DQA1*01-B1*05L
EFQFCNDPFL

SEQ ID NO: 23057 - protein, 13 aa, Severe acute respiratory syndrome coronavirus 2
  REGION 1..13: note = Table B: HLA-DQA1*01-B1*05L HLA-DPA1*02:01-B1*13:01L
YHKNNKSWMESEF

SEQ ID NO: 23058 - protein, 10 aa, Severe acute respiratory syndrome coronavirus 2
  REGION 1..10: note = Table B: HLA-DQA1*01-B1*05L
NKSWMESEFR

SEQ ID NO: 23059 - protein, 11 aa, Severe acute respiratory syndrome coronavirus 2
  REGION 1..11: note = Table B: HLA-DQA1*01-B1*05L
VSQPFLMDLEG

SEQ ID NO: 23060 - protein, 11 aa, Severe acute respiratory syndrome coronavirus 2
  REGION 1..11: note = Table B: HLA-DQA1*01-B1*05L
LREFVFKNIDG

SEQ ID NO: 23061 - protein, 12 aa, Severe acute respiratory syndrome coronavirus 2
  REGION 1..12: note = Table B: HLA-DQA1*01-B1*05L HLA-DQA1*03:01-B1*03:02L
DLPQGFSALEPL

SEQ ID NO: 23062 - protein, 13 aa, Severe acute respiratory syndrome coronavirus 2
  REGION 1..13: note = Table B: HLA-DQA1*01-B1*05L
GFSALEPLVDLPI

SEQ ID NO: 23063 - protein, 12 aa, Severe acute respiratory syndrome coronavirus 2
  REGION 1..12: note = Table B: HLA-DQA1*01-B1*05L
GAAAYYVGYLQP

SEQ ID NO: 23064 - protein, 13 aa, Severe acute respiratory syndrome coronavirus 2
  REGION 1..13: note = Table B: HLA-DQA1*01-B1*05L HLA-DQA1*05:01-B1*02:01L
ITDAVDCALDPLS

SEQ ID NO: 23065 - protein, 10 aa, Severe acute respiratory syndrome coronavirus 2
  REGION 1..10: note = Table B: HLA-DQA1*01-B1*05L HLA-DQA1*01:03-B1*06:01L
ESIVRFPNIT

SEQ ID NO: 23066 - protein, 11 aa, Severe acute respiratory syndrome coronavirus 2
  REGION 1..11: note = Table B: HLA-DQA1*01-B1*05L
ATRFASVYAWN

SEQ ID NO: 23067 - protein, 10 aa, Severe acute respiratory syndrome coronavirus 2
  REGION 1..10: note = Table B: HLA-DQA1*01-B1*05L
FTNVYADSFV

SEQ ID NO: 23068 - protein, 10 aa, Severe acute respiratory syndrome coronavirus 2
  REGION 1..10: note = Table B: HLA-DQA1*01-B1*05L
VYADSFVIRG

SEQ ID NO: 23069 - protein, 10 aa, Severe acute respiratory syndrome coronavirus 2
  REGION 1..10: note = Table B: HLA-DQA1*01-B1*05L
YNYKLPDDFT

SEQ ID NO: 23070 - protein, 12 aa, Severe acute respiratory syndrome coronavirus 2
  REGION 1..12: note = Table B: HLA-DQA1*01-B1*05L HLA-DQA1*05:01-B1*02:01L
AWNSNNLDSKVG

SEQ ID NO: 23071 - protein, 14 aa, Severe acute respiratory syndrome coronavirus 2
  REGION 1..14: note = Table B: HLA-DQA1*01-B1*05L
QPTNGVGYQPYRVV

SEQ ID NO: 23072 - protein, 10 aa, Severe acute respiratory syndrome coronavirus 2
  REGION 1..10: note = Table B: HLA-DQA1*01-B1*05L
YQPYRVVVLS

SEQ ID NO: 23073 - protein, 13 aa, Severe acute respiratory syndrome coronavirus 2
  REGION 1..13: note = Table B: HLA-DQA1*01-B1*05L
FNFNGLTGTGVLT

SEQ ID NO: 23074 - protein, 10 aa, Severe acute respiratory syndrome coronavirus 2
  REGION 1..10: note = Table B: HLA-DQA1*01-B1*05L HLA-DPA1*01:02-B1*04:01L
FLPFQQFGRD

SEQ ID NO: 23075 - protein, 10 aa, Severe acute respiratory syndrome coronavirus 2
  REGION 1..10: note = Table B: HLA-DQA1*01-B1*05L
LPFQQFGRDI

SEQ ID NO: 23076 - protein, 12 aa, Severe acute respiratory syndrome coronavirus 2
  REGION 1..12: note = Table B: HLA-DQA1*01-B1*05L HLA-DQA1*03:01-B1*03:02L
QQFGRDIADTTD

SEQ ID NO: 23077 - protein, 10 aa, Severe acute respiratory syndrome coronavirus 2
  REGION 1..10: note = Table B: HLA-DQA1*01-B1*05L
GRDIADTTDA

SEQ ID NO: 23078 - protein, 10 aa, Severe acute respiratory syndrome coronavirus 2
  REGION 1..10: note = Table B: HLA-DQA1*01-B1*05L HLA-DQA1*03:01-B1*03:02L HLA-DQA1*02:01-B1*03:03L
DAVRDPQTLE

SEQ ID NO: 23079 - protein, 11 aa, Severe acute respiratory syndrome coronavirus 2
  REGION 1..11: note = Table B: HLA-DQA1*01-B1*05L
AVRDPQTLEIL

SEQ ID NO: 23080 - protein, 12 aa, Severe acute respiratory syndrome coronavirus 2
  REGION 1..12: note = Table B: HLA-DQA1*01-B1*05L
LTGIAVEQDKNT

SEQ ID NO: 23081 - protein, 11 aa, Severe acute respiratory syndrome coronavirus 2
  REGION 1..11: note = Table B: HLA-DQA1*01-B1*05L
PSKRSFIEDLL

SEQ ID NO: 23082 - protein, 10 aa, Severe acute respiratory syndrome coronavirus 2
  REGION 1..10: note = Table B: HLA-DQA1*01-B1*05L
RSFIEDLLFN

SEQ ID NO: 23083 - protein, 11 aa, Severe acute respiratory syndrome coronavirus 2
  REGION 1..11: note = Table B: HLA-DQA1*01-B1*05L HLA-DRB1*15:03L
VTLADAGFIKQ

SEQ ID NO: 23084 - protein, 12 aa, Severe acute respiratory syndrome coronavirus 2
  REGION 1..12: note = Table B: HLA-DQA1*01-B1*05L HLA-DRB1*16:01L HLA-DRB1*15:03L
FIKQYGDCLGDI

SEQ ID NO: 23085 - protein, 12 aa, Severe acute respiratory syndrome coronavirus 2
  REGION 1..12: note = Table B: HLA-DQA1*01-B1*05L HLA-DQA1*05:01-B1*02:01L HLA-DQA1*03:01-B1*03:02L
LPPLLTDEMIAQ

SEQ ID NO: 23086 - protein, 11 aa, Severe acute respiratory syndrome coronavirus 2
  REGION 1..11: note = Table B: HLA-DQA1*01-B1*05L HLA-DRB1*15:03L
EMIAQYTSALL

SEQ ID NO: 23087 - protein, 12 aa, Severe acute respiratory syndrome coronavirus 2
  REGION 1..12: note = Table B: HLA-DQA1*01-B1*05L
QMAYRFNGIGVT

SEQ ID NO: 23088 - protein, 10 aa, Severe acute respiratory syndrome coronavirus 2
  REGION 1..10: note = Table B: HLA-DQA1*01-B1*05L
QNVLYENQKL

SEQ ID NO: 23089 - protein, 13 aa, Severe acute respiratory syndrome coronavirus 2
  REGION 1..13: note = Table B: HLA-DQA1*01-B1*05L HLA-DRB1*15:03L
SNFGAISSVLNDI

SEQ ID NO: 23090 - protein, 12 aa, Severe acute respiratory syndrome coronavirus 2
  REGION 1..12: note = Table B: HLA-DQA1*01-B1*05L
ISSVLNDILSRL

SEQ ID NO: 23091 - protein, 11 aa, Severe acute respiratory syndrome coronavirus 2
  REGION 1..11: note = Table B: HLA-DQA1*01-B1*05L
TQRNFYEPQII

SEQ ID NO: 23092 - protein, 10 aa, Severe acute respiratory syndrome coronavirus 2
  REGION 1..10: note = Table B: HLA-DQA1*01-B1*05L
RNFYEPQIIT

SEQ ID NO: 23093 - protein, 11 aa, Severe acute respiratory syndrome coronavirus 2
  REGION 1..11: note = Table B: HLA-DQA1*01-B1*05L
NFYEPQIITTD

SEQ ID NO: 23094 - protein, 12 aa, Severe acute respiratory syndrome coronavirus 2
  REGION 1..12: note = Table B: HLA-DQA1*01-B1*05L
GIVNNTVYDPLQ

SEQ ID NO: 23095 - protein, 10 aa, Severe acute respiratory syndrome coronavirus 2
  REGION 1..10: note = Table B: HLA-DQA1*01-B1*05L HLA-DQA1*03:01-B1*03:02L
YDPLQPELDS

SEQ ID NO: 23096 - protein, 11 aa, Severe acute respiratory syndrome coronavirus 2
  REGION 1..11: note = Table B: HLA-DQA1*01-B1*05L HLA-DQA1*03:01-B1*03:02L HLA-DQA1*02:01-B1*03:03L
DPLQPELDSFK

SEQ ID NO: 23097 - protein, 11 aa, Severe acute respiratory syndrome coronavirus 2
  REGION 1..11: note = Table B: HLA-DQA1*01-B1*05L
QPELDSFKEEL

SEQ ID NO: 23098 - protein, 10 aa, Severe acute respiratory syndrome coronavirus 2
  REGION 1..10: note = Table B: HLA-DQA1*01-B1*05L
ELDSFKEELD

SEQ ID NO: 23099 - protein, 11 aa, Severe acute respiratory syndrome coronavirus 2
  REGION 1..11: note = Table B: HLA-DQA1*01-B1*05L
FKNHTSPDVDL

SEQ ID NO: 23100 - protein, 10 aa, Severe acute respiratory syndrome coronavirus 2
  REGION 1..10: note = Table B: HLA-DQA1*01-B1*05L
NHTSPDVDLG

SEQ ID NO: 23101 - protein, 12 aa, Severe acute respiratory syndrome coronavirus 2
  REGION 1..12: note = Table B: HLA-DQA1*01-B1*05L HLA-DQA1*05:01-B1*02:01L HLA-DQA1*03:01-B1*03:02L
TSPDVDLGDISG

SEQ ID NO: 23102 - protein, 12 aa, Severe acute respiratory syndrome coronavirus 2
  REGION 1..12: note = Table B: HLA-DQA1*01-B1*05L HLA-DQA1*05:01-B1*02:01L HLA-DPA1*02:01-B1*13:01L HLA-DPA1*03:01-B1*105:01L HLA-DRB1*15:03L
VVNIQKEIDRLN

SEQ ID NO: 23103 - protein, 11 aa, Severe acute respiratory syndrome coronavirus 2
  REGION 1..11: note = Table B: HLA-DQA1*01-B1*05L
KNLNESLIDLQ

SEQ ID NO: 23104 - protein, 11 aa, Severe acute respiratory syndrome coronavirus 2
  REGION 1..11: note = Table B: HLA-DQA1*01-B1*05L
NLNESLIDLQE

SEQ ID NO: 23105 - protein, 11 aa, Severe acute respiratory syndrome coronavirus 2
  REGION 1..11: note = Table B: HLA-DQA1*01-B1*05L
LNESLIDLQEL

SEQ ID NO: 23106 - protein, 11 aa, Severe acute respiratory syndrome coronavirus 2
  REGION 1..11: note = Table B: HLA-DQA1*01-B1*05L HLA-DQA1*05:01-B1*02:01L
NESLIDLQELG

SEQ ID NO: 23107 - protein, 10 aa, Severe acute respiratory syndrome coronavirus 2
  REGION 1..10: note = Table B: HLA-DQA1*01-B1*05L
KFDEDDSEPV

SEQ ID NO: 23108 - protein, 11 aa, Severe acute respiratory syndrome coronavirus 2
  REGION 1..11: note = Table B: HLA-DQA1*01-B1*05L
KNPLLYDANYF

SEQ ID NO: 23109 - protein, 12 aa, Severe acute respiratory syndrome coronavirus 2
  REGION 1..12: note = Table B: HLA-DQA1*01-B1*05L
DYCIPYNSVTSS

SEQ ID NO: 23110 - protein, 11 aa, Severe acute respiratory syndrome coronavirus 2
  REGION 1..11: note = Table B: HLA-DQA1*01-B1*05L HLA-DQA1*05:01-B1*02:01L HLA-DQA1*03:01-B1*03:02L
SPISEHDYQIG

SEQ ID NO: 23111 - protein, 10 aa, Severe acute respiratory syndrome coronavirus 2
  REGION 1..10: note = Table B: HLA-DQA1*01-B1*05L
QIGGYTEKWE

SEQ ID NO: 23112 - protein, 11 aa, Severe acute respiratory syndrome coronavirus 2
  REGION 1..11: note = Table B: HLA-DQA1*01-B1*05L HLA-DQA1*02:01-B1*03:03L
YTEKWESGVKD

SEQ ID NO: 23113 - protein, 10 aa, Severe acute respiratory syndrome coronavirus 2
  REGION 1..10: note = Table B: HLA-DQA1*01-B1*05L
HSYFTSDYYQ

SEQ ID NO: 23114 - protein, 10 aa, Severe acute respiratory syndrome coronavirus 2
  REGION 1..10: note = Table B: HLA-DQA1*01-B1*05L
EPIYDEPTTT

SEQ ID NO: 23115 - protein, 12 aa, Severe acute respiratory syndrome coronavirus 2
  REGION 1..12: note = Table B: HLA-DQA1*01-B1*05L HLA-DRB1*16:01L HLA-DQA1*01:03-B1*06:01L HLA-DQA1*02:01-B1*03:03L
ADSNGTITVEEL

SEQ ID NO: 23116 - protein, 11 aa, Severe acute respiratory syndrome coronavirus 2
  REGION 1..11: note = Table B: HLA-DQA1*01-B1*05L
KLLEQWNLVIG

SEQ ID NO: 23117 - protein, 10 aa, Severe acute respiratory syndrome coronavirus 2
  REGION 1..10: note = Table B: HLA-DQA1*01-B1*05L HLA-DQA1*05:01-B1*02:01L HLA-DQA1*03:01-B1*03:02L
SMWSFNPETN

SEQ ID NO: 23118 - protein, 11 aa, Severe acute respiratory syndrome coronavirus 2
  REGION 1..11: note = Table B: HLA-DQA1*01-B1*05L HLA-DQA1*05:01-B1*02:01L HLA-DPA1*03:01-B1*105:01L HLA-DQA1*01:03-B1*06:01L
ILTRPLLESEL

SEQ ID NO: 23119 - protein, 10 aa, Severe acute respiratory syndrome coronavirus 2
  REGION 1..10: note = Table B: HLA-DQA1*01-B1*05L HLA-DQA1*05:01-B1*02:01L HLA-DQA1*03:01-B1*03:02L
DHSSSSDNIA

SEQ ID NO: 23120 - protein, 11 aa, Severe acute respiratory syndrome coronavirus 2
  REGION 1..11: note = Table B: HLA-DQA1*01-B1*05L HLA-DPA1*01:03-B1*04:02L HLA-DPA1*02:01-B1*13:01L HLA-DPA1*01:02-B1*04:01L HLA-DQA1*01:03-B1*06:01L HLA-DRB1*15:03L
TFKVSIWNLDY

SEQ ID NO: 23121 - protein, 11 aa, Severe acute respiratory syndrome coronavirus 2
  REGION 1..11: note = Table B: HLA-DQA1*01-B1*05L
VSIWNLDYIIN

SEQ ID NO: 23122 - protein, 11 aa, Severe acute respiratory syndrome coronavirus 2
  REGION 1..11: note = Table B: HLA-DQA1*01-B1*05L
NLDYIINLIIK

SEQ ID NO: 23123 - protein, 11 aa, Severe acute respiratory syndrome coronavirus 2
  REGION 1..11: note = Table B: HLA-DQA1*01-B1*05L HLA-DQA1*03:01-B1*03:02L
NKYSQLDEEQP

SEQ ID NO: 23124 - protein, 11 aa, Severe acute respiratory syndrome coronavirus 2
  REGION 1..11: note = Table B: HLA-DQA1*01-B1*05L
KYSQLDEEQPM

SEQ ID NO: 23125 - protein, 11 aa, Severe acute respiratory syndrome coronavirus 2
  REGION 1..11: note = Table B: HLA-DQA1*01-B1*05L HLA-DQA1*05:01-B1*02:01L
QLDEEQPMEID

SEQ ID NO: 23126 - protein, 10 aa, Severe acute respiratory syndrome coronavirus 2
  REGION 1..10: note = Table B: HLA-DQA1*01-B1*05L HLA-DQA1*03:01-B1*03:02L
TYEGNSPFHP

SEQ ID NO: 23127 - protein, 12 aa, Severe acute respiratory syndrome coronavirus 2
  REGION 1..12: note = Table B: HLA-DQA1*01-B1*05L HLA-DPA1*03:01-B1*105:01L HLA-DRB1*15:03L
IIFWFSLELQDH

SEQ ID NO: 23128 - protein, 11 aa, Severe acute respiratory syndrome coronavirus 2
  REGION 1..11: note = Table B: HLA-DQA1*01-B1*05L
TQHQPYVVDDP

SEQ ID NO: 23129 - protein, 11 aa, Severe acute respiratory syndrome coronavirus 2
  REGION 1..11: note = Table B: HLA-DQA1*01-B1*05L
QPYVVDDPCPI

SEQ ID NO: 23130 - protein, 10 aa, Severe acute respiratory syndrome coronavirus 2
  REGION 1..10: note = Table B: HLA-DQA1*01-B1*05L
SPIQYIDIGN

SEQ ID NO: 23131 - protein, 10 aa, Severe acute respiratory syndrome coronavirus 2
  REGION 1..10: note = Table B: HLA-DQA1*01-B1*05L
IQYIDIGNYT

SEQ ID NO: 23132 - protein, 11 aa, Severe acute respiratory syndrome coronavirus 2
  REGION 1..11: note = Table B: HLA-DQA1*01-B1*05L
VRCSFYEDFLE

SEQ ID NO: 23133 - protein, 10 aa, Severe acute respiratory syndrome coronavirus 2
  REGION 1..10: note = Table B: HLA-DQA1*01-B1*05L HLA-DPA1*03:01-B1*105:01L
DFLEYHDVRV

SEQ ID NO: 23134 - protein, 10 aa, Severe acute respiratory syndrome coronavirus 2
  REGION 1..10: note = Table B: HLA-DQA1*01-B1*05L HLA-DPA1*03:01-B1*105:01L HLA-DQA1*03:01-B1*03:02L HLA-DPA1*01:02-B1*04:01L HLA-DQA1*01:03-B1*06:01L HLA-DQA1*02:01-B1*03:03L
EYHDVRVVLD

SEQ ID NO: 23135 - protein, 11 aa, Severe acute respiratory syndrome coronavirus 2
  REGION 1..11: note = Table B: HLA-DQA1*01-B1*05L HLA-DQA1*05:01-B1*02:01L
NTNSSPDDQIG

SEQ ID NO: 23136 - protein, 12 aa, Severe acute respiratory syndrome coronavirus 2
  REGION 1..12: note = Table B: HLA-DQA1*01-B1*05L HLA-DQA1*05:01-B1*02:01L
EGALNTPKDHIG

SEQ ID NO: 23137 - protein, 11 aa, Severe acute respiratory syndrome coronavirus 2
  REGION 1..11: note = Table B: HLA-DQA1*01-B1*05L
TATKAYNVTQA

SEQ ID NO: 23138 - protein, 10 aa, Severe acute respiratory syndrome coronavirus 2
  REGION 1..10: note = Table B: HLA-DQA1*01-B1*05L HLA-DQA1*05:01-B1*02:01L HLA-DQA1*03:01-B1*03:02L HLA-DQA1*01:03-B1*06:01L HLA-DQA1*02:01-B1*03:03L
GNFGDQELIR

SEQ ID NO: 23139 - protein, 11 aa, Severe acute respiratory syndrome coronavirus 2
  REGION 1..11: note = Table B: HLA-DQA1*01-B1*05L
DKDPNFKDQVI

SEQ ID NO: 23140 - protein, 11 aa, Severe acute respiratory syndrome coronavirus 2
  REGION 1..11: note = Table B: HLA-DQA1*01-B1*05L HLA-DQA1*03:01-B1*03:02L
DAYKTFPPTEP

SEQ ID NO: 23141 - protein, 10 aa, Severe acute respiratory syndrome coronavirus 2
  REGION 1..10: note = Table B: HLA-DQA1*01-B1*05L
LPAADLDDFS

SEQ ID NO: 23142 - protein, 11 aa, Severe acute respiratory syndrome coronavirus 2
  REGION 1..11: note = Table B: HLA-DQA1*01-B1*05L HLA-DQA1*03:01-B1*03:02L
DLDDFSKQLQQ

SEQ ID NO: 23143 - protein, 14 aa, Severe acute respiratory syndrome coronavirus 2
  REGION 1..14: note = Table B: HLA-DQA1*05:05-B1*03:19L HLA-DPA1*03:01-B1*105:01L
GFGDSVEEVLSEAR

SEQ ID NO: 23144 - protein, 10 aa, Severe acute respiratory syndrome coronavirus 2
  REGION 1..10: note = Table B: HLA-DQA1*05:05-B1*03:19L HLA-DQA1*05:01-B1*02:01L
LGDELGTDPY

SEQ ID NO: 23145 - protein, 14 aa, Severe acute respiratory syndrome coronavirus 2
  REGION 1..14: note = Table B: HLA-DQA1*05:05-B1*03:19L HLA-DQA1*05:05-B1*03:01L
YVDNNFCGPDGYPL

SEQ ID NO: 23146 - protein, 10 aa, Severe acute respiratory syndrome coronavirus 2
  REGION 1..10: note = Table B: HLA-DQA1*05:05-B1*03:19L
LDFIDTKRGV

SEQ ID NO: 23147 - protein, 11 aa, Severe acute respiratory syndrome coronavirus 2
  REGION 1..11: note = Table B: HLA-DQA1*05:05-B1*03:19L
VFPLNSIIKTI

SEQ ID NO: 23148 - protein, 10 aa, Severe acute respiratory syndrome coronavirus 2
  REGION 1..10: note = Table B: HLA-DQA1*05:05-B1*03:19L
GDFVKATCEF

SEQ ID NO: 23149 - protein, 10 aa, Severe acute respiratory syndrome coronavirus 2
  REGION 1..10: note = Table B: HLA-DQA1*05:05-B1*03:19L
TKEGATTCGY

SEQ ID NO: 23150 - protein, 15 aa, Severe acute respiratory syndrome coronavirus 2
  REGION 1..15: note = Table B: HLA-DQA1*05:05-B1*03:19L
GATTCGYLPQNAVVK

SEQ ID NO: 23151 - protein, 11 aa, Severe acute respiratory syndrome coronavirus 2
  REGION 1..11: note = Table B: HLA-DQA1*05:05-B1*03:19L
IVGDFKLNEEI

SEQ ID NO: 23152 - protein, 15 aa, Severe acute respiratory syndrome coronavirus 2
  REGION 1..15: note = Table B: HLA-DQA1*05:05-B1*03:19L
NFKVTKGKAKKGAWN

SEQ ID NO: 23153 - protein, 10 aa, Severe acute respiratory syndrome coronavirus 2
  REGION 1..10: note = Table B: HLA-DQA1*05:05-B1*03:19L
AWNIGEQKSI

SEQ ID NO: 23154 - protein, 13 aa, Severe acute respiratory syndrome coronavirus 2
  REGION 1..13: note = Table B: HLA-DQA1*05:05-B1*03:19L
FISTCACEIVGGQ

SEQ ID NO: 23155 - protein, 12 aa, Severe acute respiratory syndrome coronavirus 2
  REGION 1..12: note = Table B: HLA-DQA1*05:05-B1*03:19L
IGGAKLKALNLG

SEQ ID NO: 23156 - protein, 14 aa, Severe acute respiratory syndrome coronavirus 2
  REGION 1..14: note = Table B: HLA-DQA1*05:05-B1*03:19L HLA-DPA1*03:01-B1*105:01L HLA-DRB1*15:03L
LKALNLGETFVTHS

SEQ ID NO: 23157 - protein, 11 aa, Severe acute respiratory syndrome coronavirus 2
  REGION 1..11: note = Table B: HLA-DQA1*05:05-B1*03:19L
LLMPLKAPKEI

SEQ ID NO: 23158 - protein, 11 aa, Severe acute respiratory syndrome coronavirus 2
  REGION 1..11: note = Table B: HLA-DQA1*05:05-B1*03:19L
PVSELLTPLGI

SEQ ID NO: 23159 - protein, 11 aa, Severe acute respiratory syndrome coronavirus 2
  REGION 1..11: note = Table B: HLA-DQA1*05:05-B1*03:19L HLA-DQA1*01:03-B1*06:01L HLA-DQA1*02:01-B1*03:03L
LTPLGIDLDEW

SEQ ID NO: 23160 - protein, 10 aa, Severe acute respiratory syndrome coronavirus 2
  REGION 1..10: note = Table B: HLA-DQA1*05:05-B1*03:19L HLA-DQA1*05:01-B1*02:01L
QYEYGTEDDY

SEQ ID NO: 23161 - protein, 11 aa, Severe acute respiratory syndrome coronavirus 2
  REGION 1..11: note = Table B: HLA-DQA1*05:05-B1*03:19L HLA-DQA1*05:01-B1*02:01L
LQPEEEQEEDW

SEQ ID NO: 23162 - protein, 13 aa, Severe acute respiratory syndrome coronavirus 2
  REGION 1..13: note = Table B: HLA-DQA1*05:05-B1*03:19L HLA-DRB1*16:01L
DDDSQQTVGQQDG

SEQ ID NO: 23163 - protein, 10 aa, Severe acute respiratory syndrome coronavirus 2
  REGION 1..10: note = Table B: HLA-DQA1*05:05-B1*03:19L
GSEDNQTTTI

SEQ ID NO: 23164 - protein, 12 aa, Severe acute respiratory syndrome coronavirus 2
  REGION 1..12: note = Table B: HLA-DQA1*05:05-B1*03:19L
SEDNQTTTIQTI

SEQ ID NO: 23165 - protein, 11 aa, Severe acute respiratory syndrome coronavirus 2
  REGION 1..11: note = Table B: HLA-DQA1*05:05-B1*03:19L HLA-DQA1*03:01-B1*03:02L
VEVQPQLEMEL

SEQ ID NO: 23166 - protein, 10 aa, Severe acute respiratory syndrome coronavirus 2
  REGION 1..10: note = Table B: HLA-DQA1*05:05-B1*03:19L HLA-DQA1*02:01-B1*03:03L HLA-DRB1*15:03L
YLKLTDNVYI

SEQ ID NO: 23167 - protein, 10 aa, Severe acute respiratory syndrome coronavirus 2
  REGION 1..10: note = Table B: HLA-DQA1*05:05-B1*03:19L
ADIVEEAKKV

SEQ ID NO: 23168 - protein, 10 aa, Severe acute respiratory syndrome coronavirus 2
  REGION 1..10: note = Table B: HLA-DQA1*05:05-B1*03:19L
CVDTVRTNVY

SEQ ID NO: 23169 - protein, 10 aa, Severe acute respiratory syndrome coronavirus 2
  REGION 1..10: note = Table B: HLA-DQA1*05:05-B1*03:19L HLA-DPA1*01:03-B1*104:01L
FLTENLLLYI

SEQ ID NO: 23170 - protein, 10 aa, Severe acute respiratory syndrome coronavirus 2
  REGION 1..10: note = Table B: HLA-DQA1*05:05-B1*03:19L HLA-DPA1*01:03-B1*104:01L
TENLLLYIDI

SEQ ID NO: 23171 - protein, 10 aa, Severe acute respiratory syndrome coronavirus 2
  REGION 1..10: note = Table B: HLA-DQA1*05:05-B1*03:19L
QEGVLTAVVI

SEQ ID NO: 23172 - protein, 11 aa, Severe acute respiratory syndrome coronavirus 2
  REGION 1..11: note = Table B: HLA-DQA1*05:05-B1*03:19L HLA-DQA1*05:01-B1*02:01L
KVPTDNYITTY

SEQ ID NO: 23173 - protein, 10 aa, Severe acute respiratory syndrome coronavirus 2
  REGION 1..10: note = Table B: HLA-DQA1*05:05-B1*03:19L
NDLNETLVTM

SEQ ID NO: 23174 - protein, 12 aa, Severe acute respiratory syndrome coronavirus 2
  REGION 1..12: note = Table B: HLA-DQA1*05:05-B1*03:19L HLA-DRB1*16:01L
IEFLKRGDKSVY

SEQ ID NO: 23175 - protein, 10 aa, Severe acute respiratory syndrome coronavirus 2
  REGION 1..10: note = Table B: HLA-DQA1*05:05-B1*03:19L HLA-DPA1*01:03-B1*104:01L
VDNINLHTQV

SEQ ID NO: 23176 - protein, 12 aa, Severe acute respiratory syndrome coronavirus 2
  REGION 1..12: note = Table B: HLA-DQA1*05:05-B1*03:19L HLA-DQA1*05:01-B1*02:01L HLA-DRB1*12:01L HLA-DRB1*15:03L
VVDMSMTYGQQF

SEQ ID NO: 23177 - protein, 10 aa, Severe acute respiratory syndrome coronavirus 2
  REGION 1..10: note = Table B: HLA-DQA1*05:05-B1*03:19M HLA-DPA1*01:03-B1*104:01L
GEAANFCALI

SEQ ID NO: 23178 - protein, 10 aa, Severe acute respiratory syndrome coronavirus 2
  REGION 1..10: note = Table B: HLA-DQA1*05:05-B1*03:19L HLA-DPA1*01:03-B1*104:01L
YKENSYTTTI

SEQ ID NO: 23179 - protein, 14 aa, Severe acute respiratory syndrome coronavirus 2
  REGION 1..14: note = Table B: HLA-DQA1*05:05-B1*03:19L HLA-DRB1*12:01L HLA-DRB1*04:08L
LDGVVCTEIDPKLD

SEQ ID NO: 23180 - protein, 10 aa, Severe acute respiratory syndrome coronavirus 2
  REGION 1..10: note = Table B: HLA-DQA1*05:05-B1*03:19L HLA-DRB1*16:01L HLA-DQA1*01:03-B1*06:01L HLA-DQA1*02:01-B1*03:03L
IDYKHYTPSF

SEQ ID NO: 23181 - protein, 12 aa, Severe acute respiratory syndrome coronavirus 2
  REGION 1..12: note = Table B: HLA-DQA1*05:05-B1*03:19L
ATNKATYKPNTW

SEQ ID NO: 23182 - protein, 15 aa, Severe acute respiratory syndrome coronavirus 2
  REGION 1..15: note = Table B: HLA-DQA1*05:05-B1*03:19L
GMDNLACEDLKPVSE

SEQ ID NO: 23183 - protein, 11 aa, Severe acute respiratory syndrome coronavirus 2
  REGION 1..11: note = Table B: HLA-DQA1*05:05-B1*03:19L
ILKPANNSLKI

SEQ ID NO: 23184 - protein, 10 aa, Severe acute respiratory syndrome coronavirus 2
  REGION 1..10: note = Table B: HLA-DQA1*05:05-B1*03:19L
PNELSRVLGL

SEQ ID NO: 23185 - protein, 10 aa, Severe acute respiratory syndrome coronavirus 2
  REGION 1..10: note = Table B: HLA-DQA1*05:05-B1*03:19L
KFCLEASFNY

SEQ ID NO: 23186 - protein, 15 aa, Severe acute respiratory syndrome coronavirus 2
  REGION 1..15: note = Table B: HLA-DQA1*05:05-B1*03:19L
TGSIPCSVCLSGLDS

SEQ ID NO: 23187 - protein, 10 aa, Severe acute respiratory syndrome coronavirus 2
  REGION 1..10: note = Table B: HLA-DQA1*05:05-B1*03:19L HLA-DPA1*01:03-B1*104:01L
LDTYPSLETI

SEQ ID NO: 23188 - protein, 10 aa, Severe acute respiratory syndrome coronavirus 2
  REGION 1..10: note = Table B: HLA-DQA1*05:05-B1*03:19L HLA-DQA1*05:05-B1*03:116L HLA-DPA1*02:01-B1*13:01L HLA-DQA1*01:03-B1*06:01L HLA-DRB1*15:03L
TYPSLETIQI

SEQ ID NO: 23189 - protein, 14 aa, Severe acute respiratory syndrome coronavirus 2
  REGION 1..14: note = Table B: HLA-DQA1*05:05-B1*03:19L
PSLETIQITISSFK

SEQ ID NO: 23190 - protein, 10 aa, Severe acute respiratory syndrome coronavirus 2
  REGION 1..10: note = Table B: HLA-DQA1*05:05-B1*03:19L
LVAEWFLAYI

SEQ ID NO: 23191 - protein, 10 aa, Severe acute respiratory syndrome coronavirus 2
  REGION 1..10: note = Table B: HLA-DQA1*05:05-B1*03:19L
AEWFLAYILF

SEQ ID NO: 23192 - protein, 10 aa, Severe acute respiratory syndrome coronavirus 2
  REGION 1..10: note = Table B: HLA-DQA1*05:05-B1*03:19L
VECTTIVNGV

SEQ ID NO: 23193 - protein, 15 aa, Severe acute respiratory syndrome coronavirus 2
  REGION 1..15: note = Table B: HLA-DQA1*05:05-B1*03:19L HLA-DPA1*03:01-B1*105:01L
DTFCAGSTFISDEVA

SEQ ID NO: 23194 - protein, 13 aa, Severe acute respiratory syndrome coronavirus 2
  REGION 1..13: note = Table B: HLA-DQA1*05:05-B1*03:19L HLA-DRB1*08:02L
SHFVNLDNLRANN

SEQ ID NO: 23195 - protein, 13 aa, Severe acute respiratory syndrome coronavirus 2
  REGION 1..13: note = Table B: HLA-DQA1*05:05-B1*03:19L HLA-DPA1*01:02-B1*04:01L
VIVFDGKSKCEES

SEQ ID NO: 23196 - protein, 16 aa, Severe acute respiratory syndrome coronavirus 2
  REGION 1..16: note = Table B: HLA-DQA1*05:05-B1*03:19L
VVNVVTTKIALKGGKI

SEQ ID NO: 23197 - protein, 10 aa, Severe acute respiratory syndrome coronavirus 2
  REGION 1..10: note = Table B: HLA-DQA1*05:05-B1*03:19L
SSEIIGYKAI

SEQ ID NO: 23198 - protein, 11 aa, Severe acute respiratory syndrome coronavirus 2
  REGION 1..11: note = Table B: HLA-DQA1*05:05-B1*03:19L HLA-DQA1*05:01-B1*02:01L HLA-DPA1*03:01-B1*105:01L HLA-DQA1*01:03-B1*06:01L
FANKHADFDTW

SEQ ID NO: 23199 - protein, 10 aa, Severe acute respiratory syndrome coronavirus 2
  REGION 1..10: note = Table B: HLA-DQA1*05:05-B1*03:19L
YTNDKACPLI

SEQ ID NO: 23200 - protein, 10 aa, Severe acute respiratory syndrome coronavirus 2
  REGION 1..10: note = Table B: HLA-DQA1*05:05-B1*03:19L
GDFLHFLPRV

SEQ ID NO: 23201 - protein, 10 aa, Severe acute respiratory syndrome coronavirus 2
  REGION 1..10: note = Table B: HLA-DQA1*05:05-B1*03:19L
CYTPSKLIEY

SEQ ID NO: 23202 - protein, 10 aa, Severe acute respiratory syndrome coronavirus 2
  REGION 1..10: note = Table B: HLA-DQA1*05:05-B1*03:19L HLA-DQA1*05:01-B1*02:01L
TNVLEGSVAY

SEQ ID NO: 23203 - protein, 12 aa, Severe acute respiratory syndrome coronavirus 2
  REGION 1..12: note = Table B: HLA-DQA1*05:05-B1*03:19L HLA-DQA1*02:01-B1*03:03L
EAGVCVSTSGRW

SEQ ID NO: 23204 - protein, 10 aa, Severe acute respiratory syndrome coronavirus 2
  REGION 1..10: note = Table B: HLA-DQA1*05:05-B1*03:19L HLA-DQA1*02:01-B1*03:03L
SGRWVLNNDY

SEQ ID NO: 23205 - protein, 10 aa, Severe acute respiratory syndrome coronavirus 2
  REGION 1..10: note = Table B: HLA-DQA1*05:05-B1*03:19L HLA-DPA1*01:03-B1*104:01L
NDYYRSLPGV

SEQ ID NO: 23206 - protein, 15 aa, Severe acute respiratory syndrome coronavirus 2
  REGION 1..15: note = Table B: HLA-DQA1*05:05-B1*03:19L
LPGVFCGVDAVNLLT

SEQ ID NO: 23207 - protein, 16 aa, Severe acute respiratory syndrome coronavirus 2
  REGION 1..16: note = Table B: HLA-DQA1*05:05-B1*03:19L
TSYREAACCHLAKALN

SEQ ID NO: 23208 - protein, 17 aa, Severe acute respiratory syndrome coronavirus 2
  REGION 1..17: note = Table B: HLA-DQA1*05:05-B1*03:19L
DLLIRKSNHNFLVQAGN

SEQ ID NO: 23209 - protein, 12 aa, Severe acute respiratory syndrome coronavirus 2
  REGION 1..12: note = Table B: HLA-DQA1*05:05-B1*03:19L HLA-DQA1*05:05-B1*03:01L
GSFLNGSCGSVG

SEQ ID NO: 23210 - protein, 13 aa, Severe acute respiratory syndrome coronavirus 2
  REGION 1..13: note = Table B: HLA-DQA1*05:05-B1*03:19L HLA-DQA1*01:03-B1*06:01L
SFLNGSCGSVGFN

SEQ ID NO: 23211 - protein, 10 aa, Severe acute respiratory syndrome coronavirus 2
  REGION 1..10: note = Table B: HLA-DQA1*05:05-B1*03:19L
IDYDCVSFCY

SEQ ID NO: 23212 - protein, 13 aa, Severe acute respiratory syndrome coronavirus 2
  REGION 1..13: note = Table B: HLA-DQA1*05:05-B1*03:19L
PTGVHAGTDLEGN

SEQ ID NO: 23213 - protein, 15 aa, Severe acute respiratory syndrome coronavirus 2
  REGION 1..15: note = Table B: HLA-DQA1*05:05-B1*03:19L
EGNFYGPFVDRQTAQ

SEQ ID NO: 23214 - protein, 11 aa, Severe acute respiratory syndrome coronavirus 2
  REGION 1..11: note = Table B: HLA-DQA1*05:05-B1*03:19L HLA-DRB1*15:03L
FTTTLNDFNLV

SEQ ID NO: 23215 - protein, 10 aa, Severe acute respiratory syndrome coronavirus 2
  REGION 1..10: note = Table B: HLA-DQA1*05:05-B1*03:19L
FNLVAMKYNY

SEQ ID NO: 23216 - protein, 11 aa, Severe acute respiratory syndrome coronavirus 2
  REGION 1..11: note = Table B: HLA-DQA1*05:05-B1*03:19L
YNYEPLTQDHV

SEQ ID NO: 23217 - protein, 15 aa, Severe acute respiratory syndrome coronavirus 2
  REGION 1..15: note = Table B: HLA-DQA1*05:05-B1*03:19L HLA-DRB1*04:08L
VVRQCSGVTFQSAVK

SEQ ID NO: 23218 - protein, 10 aa, Severe acute respiratory syndrome coronavirus 2
  REGION 1..10: note = Table B: HLA-DQA1*05:05-B1*03:19L HLA-DPA1*01:03-B1*104:01L HLA-DQA1*01:03-B1*06:01L
GTHHWLLLTI

SEQ ID NO: 23219 - protein, 11 aa, Severe acute respiratory syndrome coronavirus 2
  REGION 1..11: note = Table B: HLA-DQA1*05:05-B1*03:19L HLA-DPA1*02:01-B1*13:01L HLA-DPA1*01:03-B1*104:01L HLA-DQA1*01:03-B1*06:01L
VYYGNALDQAI

SEQ ID NO: 23220 - protein, 13 aa, Severe acute respiratory syndrome coronavirus 2
  REGION 1..13: note = Table B: HLA-DQA1*05:05-B1*03:19L
NSQGLLPPKNSID

SEQ ID NO: 23221 - protein, 12 aa, Severe acute respiratory syndrome coronavirus 2
  REGION 1..12: note = Table B: HLA-DQA1*05:05-B1*03:19L HLA-DQA1*01:03-B1*06:01L
GLLPPKNSIDAF

SEQ ID NO: 23222 - protein, 10 aa, Severe acute respiratory syndrome coronavirus 2
  REGION 1..10: note = Table B: HLA-DQA1*05:05-B1*03:19L
LDNRATLQAI

SEQ ID NO: 23223 - protein, 14 aa, Severe acute respiratory syndrome coronavirus 2
  REGION 1..14: note = Table B: HLA-DQA1*05:05-B1*03:19L
SEFDRDAAMQRKLE

SEQ ID NO: 23224 - protein, 13 aa, Severe acute respiratory syndrome coronavirus 2
  REGION 1..13: note = Table B: HLA-DQA1*05:05-B1*03:19L
SEDKRAKVTSAMQ

SEQ ID NO: 23225 - protein, 10 aa, Severe acute respiratory syndrome coronavirus 2
  REGION 1..10: note = Table B: HLA-DQA1*05:05-B1*03:19L
LDNDALNNII

SEQ ID NO: 23226 - protein, 10 aa, Severe acute respiratory syndrome coronavirus 2
  REGION 1..10: note = Table B: HLA-DQA1*05:05-B1*03:19L HLA-DQA1*05:01-B1*02:01L
AKLMVVIPDY

SEQ ID NO: 23227 - protein, 10 aa, Severe acute respiratory syndrome coronavirus 2
  REGION 1..10: note = Table B: HLA-DQA1*05:05-B1*03:19L HLA-DQA1*05:01-B1*02:01L
SMDNSPNLAW

SEQ ID NO: 23228 - protein, 11 aa, Severe acute respiratory syndrome coronavirus 2
  REGION 1..11: note = Table B: HLA-DQA1*05:05-B1*03:19L HLA-DPA1*03:01-B1*105:01L
ANSAVKLQNNE

SEQ ID NO: 23229 - protein, 10 aa, Severe acute respiratory syndrome coronavirus 2
  REGION 1..10: note = Table B: HLA-DQA1*05:05-B1*03:19L HLA-DQA1*05:01-B1*02:01L
ACTDDNALAY

SEQ ID NO: 23230 - protein, 10 aa, Severe acute respiratory syndrome coronavirus 2
  REGION 1..10: note = Table B: HLA-DQA1*05:05-B1*03:19L
PKSDGTGTIY

SEQ ID NO: 23231 - protein, 13 aa, Severe acute respiratory syndrome coronavirus 2
  REGION 1..13: note = Table B: HLA-DQA1*05:05-B1*03:19L HLA-DPA1*03:01-B1*105:01L
LNRGMVLGSLAAT

SEQ ID NO: 23232 - protein, 11 aa, Severe acute respiratory syndrome coronavirus 2
  REGION 1..11: note = Table B: HLA-DQA1*05:05-B1*03:19L HLA-DPA1*03:01-B1*105:01L HLA-DRB1*14:17L
LAATVRLQAGN

SEQ ID NO: 23233 - protein, 14 aa, Severe acute respiratory syndrome coronavirus 2
  REGION 1..14: note = Table B: HLA-DQA1*05:05-B1*03:19L HLA-DQA1*05:05-B1*03:01L HLA-DQA1*02:01-B1*03:03L
VPANSTVLSFCAFA

SEQ ID NO: 23234 - protein, 16 aa, Severe acute respiratory syndrome coronavirus 2
  REGION 1..16: note = Table B: HLA-DQA1*05:05-B1*03:19L
GGQPITNCVKMLCTHT

SEQ ID NO: 23235 - protein, 10 aa, Severe acute respiratory syndrome coronavirus 2
  REGION 1..10: note = Table B: HLA-DQA1*05:05-B1*03:19L
PEANMDQESF

SEQ ID NO: 23236 - protein, 10 aa, Severe acute respiratory syndrome coronavirus 2
  REGION 1..10: note = Table B: HLA-DQA1*05:05-B1*03:19L
QESFGGASCC

SEQ ID NO: 23237 - protein, 10 aa, Severe acute respiratory syndrome coronavirus 2
  REGION 1..10: note = Table B: HLA-DQA1*05:05-B1*03:19L
FTLKNTVCTV

SEQ ID NO: 23238 - protein, 19 aa, Severe acute respiratory syndrome coronavirus 2
  REGION 1..19: note = Table B: HLA-DQA1*05:05-B1*03:19L
DAQSFLNRVCGVSAARLTP

SEQ ID NO: 23239 - protein, 14 aa, Severe acute respiratory syndrome coronavirus 2
  REGION 1..14: note = Table B: HLA-DQA1*05:05-B1*03:19L HLA-DQA1*01:03-B1*06:01L
RLTPCGTGTSTDVV

SEQ ID NO: 23240 - protein, 10 aa, Severe acute respiratory syndrome coronavirus 2
  REGION 1..10: note = Table B: HLA-DQA1*05:05-B1*03:19L
TDVVYRAFDI

SEQ ID NO: 23241 - protein, 10 aa, Severe acute respiratory syndrome coronavirus 2
  REGION 1..10: note = Table B: HLA-DQA1*05:05-B1*03:19L HLA-DQA1*02:01-B1*03:03L
NDKVAGFAKF

SEQ ID NO: 23242 - protein, 10 aa, Severe acute respiratory syndrome coronavirus 2
  REGION 1..10: note = Table B: HLA-DQA1*05:05-B1*03:19L
EDDNLIDSYF

SEQ ID NO: 23243 - protein, 10 aa, Severe acute respiratory syndrome coronavirus 2
  REGION 1..10: note = Table B: HLA-DQA1*05:05-B1*03:19L
KEILVTYNCC

SEQ ID NO: 23244 - protein, 10 aa, Severe acute respiratory syndrome coronavirus 2
  REGION 1..10: note = Table B: HLA-DQA1*05:05-B1*03:19L
DDDYFNKKDW

SEQ ID NO: 23245 - protein, 10 aa, Severe acute respiratory syndrome coronavirus 2
  REGION 1..10: note = Table B: HLA-DQA1*05:05-B1*03:19L HLA-DQA1*05:01-B1*02:01L
LDNQDLNGNW

SEQ ID NO: 23246 - protein, 10 aa, Severe acute respiratory syndrome coronavirus 2
  REGION 1..10: note = Table B: HLA-DQA1*05:05-B1*03:19L
QDLNGNWYDF

SEQ ID NO: 23247 - protein, 10 aa, Severe acute respiratory syndrome coronavirus 2
  REGION 1..10: note = Table B: HLA-DQA1*05:05-B1*03:19L
GSGVPVVDSY

SEQ ID NO: 23248 - protein, 11 aa, Severe acute respiratory syndrome coronavirus 2
  REGION 1..11: note = Table B: HLA-DQA1*05:05-B1*03:19L HLA-DPA1*01:03-B1*104:01L
RELGVVHNQDV

SEQ ID NO: 23249 - protein, 12 aa, Severe acute respiratory syndrome coronavirus 2
  REGION 1..12: note = Table B: HLA-DQA1*05:05-B1*03:19L HLA-DQA1*05:05-B1*03:01L
ADPAMHAASGNL

SEQ ID NO: 23250 - protein, 10 aa, Severe acute respiratory syndrome coronavirus 2
  REGION 1..10: note = Table B: HLA-DQA1*05:05-B1*03:19L
LTNNVAFQTV

SEQ ID NO: 23251 - protein, 10 aa, Severe acute respiratory syndrome coronavirus 2
  REGION 1..10: note = Table B: HLA-DQA1*05:05-B1*03:19L
QDGNAAISDY

SEQ ID NO: 23252 - protein, 10 aa, Severe acute respiratory syndrome coronavirus 2
  REGION 1..10: note = Table B: HLA-DQA1*05:05-B1*03:19M HLA-DPA1*01:03-B1*104:01L
VEVVDKYFDC

SEQ ID NO: 23253 - protein, 15 aa, Severe acute respiratory syndrome coronavirus 2
  REGION 1..15: note = Table B: HLA-DQA1*05:05-B1*03:19L HLA-DQA1*02:01-B1*03:03L
VVDKYFDCYDGGCIN

SEQ ID NO: 23254 - protein, 10 aa, Severe acute respiratory syndrome coronavirus 2
  REGION 1..10: note = Table B: HLA-DQA1*05:05-B1*03:19L
ARLYYDSMSY

SEQ ID NO: 23255 - protein, 12 aa, Severe acute respiratory syndrome coronavirus 2
  REGION 1..12: note = Table B: HLA-DQA1*05:05-B1*03:19L HLA-DQA1*05:05-B1*03:01L HLA-DQA1*01:03-B1*06:01L
TVAGVSICSTMT

SEQ ID NO: 23256 - protein, 10 aa, Severe acute respiratory syndrome coronavirus 2
  REGION 1..10: note = Table B: HLA-DQA1*05:05-B1*03:19L HLA-DRB1*16:01L HLA-DQA1*02:01-B1*03:03L
IAATRGATVV

SEQ ID NO: 23257 - protein, 10 aa, Severe acute respiratory syndrome coronavirus 2
  REGION 1..10: note = Table B: HLA-DQA1*05:05-B1*03:19L
ENPHLMGWDY

SEQ ID NO: 23258 - protein, 18 aa, Severe acute respiratory syndrome coronavirus 2
  REGION 1..18: note = Table B: HLA-DQA1*05:05-B1*03:19L
LQHRLYECLYRNRDVDTD

SEQ ID NO: 23259 - protein, 12 aa, Severe acute respiratory syndrome coronavirus 2
  REGION 1..12: note = Table B: HLA-DQA1*05:05-B1*03:19L
SDDAVVCFNSTY

SEQ ID NO: 23260 - protein, 13 aa, Severe acute respiratory syndrome coronavirus 2
  REGION 1..13: note = Table B: HLA-DQA1*05:05-B1*03:19L HLA-DPA1*01:03-B1*04:02L HLA-DQA1*05:05-B1*03:01L HLA-DQA1*02:01-B1*03:03L
VFMSEAKCWTETD

SEQ ID NO: 23261 - protein, 14 aa, Severe acute respiratory syndrome coronavirus 2
  REGION 1..14: note = Table B: HLA-DQA1*05:05-B1*03:19L HLA-DPA1*03:01-B1*105:01L HLA-DQA1*05:05-B1*03:01L
VLQAVGACVLCNSQ

SEQ ID NO: 23262 - protein, 14 aa, Severe acute respiratory syndrome coronavirus 2
  REGION 1..14: note = Table B: HLA-DQA1*05:05-B1*03:19L HLA-DPA1*03:01-B1*105:01L
LQAVGACVLCNSQT

SEQ ID NO: 23263 - protein, 10 aa, Severe acute respiratory syndrome coronavirus 2
  REGION 1..10: note = Table B: HLA-DQA1*05:05-B1*03:19L
SDNVTDFNAI

SEQ ID NO: 23264 - protein, 12 aa, Severe acute respiratory syndrome coronavirus 2
  REGION 1..12: note = Table B: HLA-DQA1*05:05-B1*03:19L HLA-DQA1*05:01-B1*02:01L
VTDFNAIATCDW

SEQ ID NO: 23265 - protein, 14 aa, Severe acute respiratory syndrome coronavirus 2
  REGION 1..14: note = Table B: HLA-DQA1*05:05-B1*03:19L HLA-DPA1*03:01-B1*105:01L HLA-DQA1*05:05-B1*03:01L HLA-DQA1*02:01-B1*03:03L
TNAGDYILANTCTE

SEQ ID NO: 23266 - protein, 10 aa, Severe acute respiratory syndrome coronavirus 2
  REGION 1..10: note = Table B: HLA-DQA1*05:05-B1*03:19M HLA-DPA1*01:03-B1*104:01L
EETFKLSYGI

SEQ ID NO: 23267 - protein, 13 aa, Severe acute respiratory syndrome coronavirus 2
  REGION 1..13: note = Table B: HLA-DQA1*05:05-B1*03:19L
TFKLSYGIATVRE

SEQ ID NO: 23268 - protein, 10 aa, Severe acute respiratory syndrome coronavirus 2
  REGION 1..10: note = Table B: HLA-DQA1*05:05-B1*03:19L HLA-DRB1*16:01L
RVTKNSKVQI

SEQ ID NO: 23269 - protein, 18 aa, Severe acute respiratory syndrome coronavirus 2
  REGION 1..18: note = Table B: HLA-DQA1*05:05-B1*03:19L HLA-DQA1*05:01-B1*02:01L HLA-DPA1*01:03-B1*104:01L HLA-DQA1*05:05-B1*03:01L HLA-DRB1*08:02L HLA-DRB1*08:03L
EKALKYLPIDKCSRIIPA

SEQ ID NO: 23270 - protein, 14 aa, Severe acute respiratory syndrome coronavirus 2
  REGION 1..14: note = Table B: HLA-DQA1*05:05-B1*03:19L HLA-DPA1*03:01-B1*105:01L HLA-DQA1*05:05-B1*03:01L HLA-DQA1*01:03-B1*06:01L
VFCTVNALPETTAD

SEQ ID NO: 23271 - protein, 10 aa, Severe acute respiratory syndrome coronavirus 2
  REGION 1..10: note = Table B: HLA-DQA1*05:05-B1*03:19L
PETTADIVVF

SEQ ID NO: 23272 - protein, 10 aa, Severe acute respiratory syndrome coronavirus 2
  REGION 1..10: note = Table B: HLA-DQA1*05:05-B1*03:19L
TADIVVFDEI

SEQ ID NO: 23273 - protein, 11 aa, Severe acute respiratory syndrome coronavirus 2
  REGION 1..11: note = Table B: HLA-DQA1*05:05-B1*03:19L HLA-DQA1*05:01-B1*02:01L
ILCIMSDRDLY

SEQ ID NO: 23274 - protein, 13 aa, Severe acute respiratory syndrome coronavirus 2
  REGION 1..13: note = Table B: HLA-DQA1*05:05-B1*03:19L HLA-DQA1*05:05-B1*03:01L
LHPTQAPTHLSVD

SEQ ID NO: 23275 - protein, 14 aa, Severe acute respiratory syndrome coronavirus 2
  REGION 1..14: note = Table B: HLA-DQA1*05:05-B1*03:19L HLA-DRB1*04:08L
VNGYPNMFITREEA

SEQ ID NO: 23276 - protein, 18 aa, Severe acute respiratory syndrome coronavirus 2
  REGION 1..18: note = Table B: HLA-DQA1*05:05-B1*03:19L
VDTPNNTDFSRVSAKPPP

SEQ ID NO: 23277 - protein, 10 aa, Severe acute respiratory syndrome coronavirus 2
  REGION 1..10: note = Table B: HLA-DQA1*05:05-B1*03:19L HLA-DPA1*01:03-B1*104:01L
FDYVYNPFMI

SEQ ID NO: 23278 - protein, 16 aa, Severe acute respiratory syndrome coronavirus 2
  REGION 1..16: note = Table B: HLA-DQA1*05:05-B1*03:19L HLA-DPA1*01:03-B1*04:02L
SNHDLYCQVHGNAHVA

SEQ ID NO: 23279 - protein, 11 aa, Severe acute respiratory syndrome coronavirus 2
  REGION 1..11: note = Table B: HLA-DQA1*05:05-B1*03:19L
YDAQPCSDKAY

SEQ ID NO: 23280 - protein, 10 aa, Severe acute respiratory syndrome coronavirus 2
  REGION 1..10: note = Table B: HLA-DQA1*05:05-B1*03:19L HLA-DQA1*05:01-B1*02:01L HLA-DQA1*03:01-B1*03:02L
GKQVVSDIDY

SEQ ID NO: 23281 - protein, 11 aa, Severe acute respiratory syndrome coronavirus 2
  REGION 1..11: note = Table B: HLA-DQA1*05:05-B1*03:19L HLA-DPA1*01:03-B1*104:01L
RLYLDAYNMMI

SEQ ID NO: 23282 - protein, 10 aa, Severe acute respiratory syndrome coronavirus 2
  REGION 1..10: note = Table B: HLA-DQA1*05:05-B1*03:19L
FDTYNLWNTF

SEQ ID NO: 23283 - protein, 12 aa, Severe acute respiratory syndrome coronavirus 2
  REGION 1..12: note = Table B: HLA-DQA1*05:05-B1*03:19L HLA-DPA1*01:03-B1*104:01L HLA-DQA1*01:03-B1*06:01L
GEVPVSIINNTV

SEQ ID NO: 23284 - protein, 11 aa, Severe acute respiratory syndrome coronavirus 2
  REGION 1..11: note = Table B: HLA-DQA1*05:05-B1*03:19L HLA-DRB1*15:03L
YTKVDGVDVEL

SEQ ID NO: 23285 - protein, 10 aa, Severe acute respiratory syndrome coronavirus 2
  REGION 1..10: note = Table B: HLA-DQA1*05:05-B1*03:19L HLA-DQA1*05:01-B1*02:01L
VDIAANTVIW

SEQ ID NO: 23286 - protein, 14 aa, Severe acute respiratory syndrome coronavirus 2
  REGION 1..14: note = Table B: HLA-DQA1*05:05-B1*03:19L HLA-DRB1*07:01L
VIWDYKRDAPAHIS

SEQ ID NO: 23287 - protein, 10 aa, Severe acute respiratory syndrome coronavirus 2
  REGION 1..10: note = Table B: HLA-DQA1*05:05-B1*03:19L HLA-DPA1*01:03-B1*104:01L
TETICAPLTV

SEQ ID NO: 23288 - protein, 10 aa, Severe acute respiratory syndrome coronavirus 2
  REGION 1..10: note = Table B: HLA-DQA1*05:05-B1*03:19L HLA-DPA1*01:03-B1*104:01L
KLEGYAFEHI

SEQ ID NO: 23289 - protein, 11 aa, Severe acute respiratory syndrome coronavirus 2
  REGION 1..11: note = Table B: HLA-DQA1*05:05-B1*03:19L
LEDFIPMDSTV

SEQ ID NO: 23290 - protein, 10 aa, Severe acute respiratory syndrome coronavirus 2
  REGION 1..10: note = Table B: HLA-DQA1*05:05-B1*03:19L
MDSTVKNYFI

SEQ ID NO: 23291 - protein, 10 aa, Severe acute respiratory syndrome coronavirus 2
  REGION 1..10: note = Table B: HLA-DQA1*05:05-B1*03:19L
IDYTEISFML

SEQ ID NO: 23292 - protein, 10 aa, Severe acute respiratory syndrome coronavirus 2
  REGION 1..10: note = Table B: HLA-DQA1*05:05-B1*03:19L
LLEKCDLQNY

SEQ ID NO: 23293 - protein, 12 aa, Severe acute respiratory syndrome coronavirus 2
  REGION 1..12: note = Table B: HLA-DQA1*05:05-B1*03:19L HLA-DQA1*05:05-B1*03:01L
GSDKGVAPGTAV

SEQ ID NO: 23294 - protein, 13 aa, Severe acute respiratory syndrome coronavirus 2
  REGION 1..13: note = Table B: HLA-DQA1*05:05-B1*03:19L HLA-DQA1*03:01-B1*03:02L HLA-DQA1*05:05-B1*03:01L
APGTAVLRQWLPT

SEQ ID NO: 23295 - protein, 10 aa, Severe acute respiratory syndrome coronavirus 2
  REGION 1..10: note = Table B: HLA-DQA1*05:05-B1*03:19L HLA-DQA1*02:01-B1*03:03L
TKENDSKEGF

SEQ ID NO: 23296 - protein, 10 aa, Severe acute respiratory syndrome coronavirus 2
  REGION 1..10: note = Table B: HLA-DQA1*05:05-B1*03:19L
ALGGSVAIKI

SEQ ID NO: 23297 - protein, 12 aa, Severe acute respiratory syndrome coronavirus 2
  REGION 1..12: note = Table B: HLA-DQA1*05:05-B1*03:19L HLA-DQA1*05:05-B1*03:01L HLA-DQA1*02:01-B1*03:03L
WWTAFVTNVNAS

SEQ ID NO: 23298 - protein, 12 aa, Severe acute respiratory syndrome coronavirus 2
  REGION 1..12: note = Table B: HLA-DQA1*05:05-B1*03:19L
YLGKPREQIDGY

SEQ ID NO: 23299 - protein, 12 aa, Severe acute respiratory syndrome coronavirus 2
  REGION 1..12: note = Table B: HLA-DQA1*05:05-B1*03:19L HLA-DQA1*05:05-B1*03:01L
LRGTAVMSLKEG

SEQ ID NO: 23300 - protein, 14 aa, Severe acute respiratory syndrome coronavirus 2
  REGION 1..14: note = Table B: HLA-DQA1*05:05-B1*03:19L HLA-DPA1*01:03-B1*104:01L
ENNRVVISSDVLVN

SEQ ID NO: 23301 - protein, 10 aa, Severe acute respiratory syndrome coronavirus 2
  REGION 1..10: note = Table B: HLA-DQA1*05:05-B1*03:19L
TNSFTRGVYY

SEQ ID NO: 23302 - protein, 14 aa, Severe acute respiratory syndrome coronavirus 2
  REGION 1..14: note = Table B: HLA-DQA1*05:05-B1*03:19L
NSFTRGVYYPDKVF

SEQ ID NO: 23303 - protein, 11 aa, Severe acute respiratory syndrome coronavirus 2
  REGION 1..11: note = Table B: HLA-DQA1*05:05-B1*03:19L HLA-DQA1*01:03-B1*06:01L HLA-DQA1*02:01-B1*03:03L
YYPDKVFRSSV

SEQ ID NO: 23304 - protein, 10 aa, Severe acute respiratory syndrome coronavirus 2
  REGION 1..10: note = Table B: HLA-DQA1*05:05-B1*03:19L HLA-DPA1*02:01-B1*13:01L HLA-DQA1*01:03-B1*06:01L
YFASTEKSNI

SEQ ID NO: 23305 - protein, 14 aa, Severe acute respiratory syndrome coronavirus 2
  REGION 1..14: note = Table B: HLA-DQA1*05:05-B1*03:19L
PGDSSSGWTAGAAA

SEQ ID NO: 23306 - protein, 11 aa, Severe acute respiratory syndrome coronavirus 2
  REGION 1..11: note = Table B: HLA-DQA1*05:05-B1*03:19L
KLPDDFTGCVI

SEQ ID NO: 23307 - protein, 10 aa, Severe acute respiratory syndrome coronavirus 2
  REGION 1..10: note = Table B: HLA-DQA1*05:05-B1*03:19L
FNCYFPLQSY

SEQ ID NO: 23308 - protein, 11 aa, Severe acute respiratory syndrome coronavirus 2
  REGION 1..11: note = Table B: HLA-DQA1*05:05-B1*03:19L
QSYGFQPTNGV

SEQ ID NO: 23309 - protein, 17 aa, Severe acute respiratory syndrome coronavirus 2
  REGION 1..17: note = Table B: HLA-DQA1*05:05-B1*03:19L HLA-DRB3*01:01L HLA-DPA1*03:01-B1*105:01L
GPKKSTNLVKNKCVNFN

SEQ ID NO: 23310 - protein, 14 aa, Severe acute respiratory syndrome coronavirus 2
  REGION 1..14: note = Table B: HLA-DQA1*05:05-B1*03:19L HLA-DQA1*05:05-B1*03:01L
TPCSFGGVSVITPG

SEQ ID NO: 23311 - protein, 12 aa, Severe acute respiratory syndrome coronavirus 2
  REGION 1..12: note = Table B: HLA-DQA1*05:05-B1*03:19L HLA-DQA1*05:05-B1*03:01L
SFGGVSVITPGT

SEQ ID NO: 23312 - protein, 10 aa, Severe acute respiratory syndrome coronavirus 2
  REGION 1..10: note = Table B: HLA-DQA1*05:05-B1*03:19L
ADQLTPTWRV

SEQ ID NO: 23313 - protein, 10 aa, Severe acute respiratory syndrome coronavirus 2
  REGION 1..10: note = Table B: HLA-DQA1*05:05-B1*03:19L
TKTSVDCTMY

SEQ ID NO: 23314 - protein, 14 aa, Severe acute respiratory syndrome coronavirus 2
  REGION 1..14: note = Table B: HLA-DQA1*05:05-B1*03:19L HLA-DPA1*01:03-B1*04:01L HLA-DQA1*02:01-B1*03:03L
NLLLQYGSFCTQLN

SEQ ID NO: 23315 - protein, 14 aa, Severe acute respiratory syndrome coronavirus 2
  REGION 1..14: note = Table B: HLA-DQA1*05:05-B1*03:19L
LQYGSFCTQLNRAL

SEQ ID NO: 23316 - protein, 14 aa, Severe acute respiratory syndrome coronavirus 2
  REGION 1..14: note = Table B: HLA-DQA1*05:05-B1*03:19L
LLFNKVTLADAGFI

SEQ ID NO: 23317 - protein, 16 aa, Severe acute respiratory syndrome coronavirus 2
  REGION 1..16: note = Table B: HLA-DQA1*05:05-B1*03:19L
IKQYGDCLGDIAARDL

SEQ ID NO: 23318 - protein, 10 aa, Severe acute respiratory syndrome coronavirus 2
  REGION 1..10: note = Table B: HLA-DQA1*05:05-B1*03:19L
LGDIAARDLI

SEQ ID NO: 23319 - protein, 10 aa, Severe acute respiratory syndrome coronavirus 2
  REGION 1..10: note = Table B: HLA-DQA1*05:05-B1*03:19L
MQMAYRFNGI

SEQ ID NO: 23320 - protein, 11 aa, Severe acute respiratory syndrome coronavirus 2
  REGION 1..11: note = Table B: HLA-DQA1*05:05-B1*03:19L
RFNGIGVTQNV

SEQ ID NO: 23321 - protein, 11 aa, Severe acute respiratory syndrome coronavirus 2
  REGION 1..11: note = Table B: HLA-DQA1*05:05-B1*03:19L HLA-DQA1*01:03-B1*06:01L
DVVNQNAQALN

SEQ ID NO: 23322 - protein, 10 aa, Severe acute respiratory syndrome coronavirus 2
  REGION 1..10: note = Table B: HLA-DQA1*05:05-B1*03:19L
NDILSRLDKV

SEQ ID NO: 23323 - protein, 10 aa, Severe acute respiratory syndrome coronavirus 2
  REGION 1..10: note = Table B: HLA-DQA1*05:05-B1*03:19L
LDKVEAEVQI

SEQ ID NO: 23324 - protein, 11 aa, Severe acute respiratory syndrome coronavirus 2
  REGION 1..11: note = Table B: HLA-DQA1*05:05-B1*03:19L HLA-DQA1*05:01-B1*02:01L
ITGRLQSLQTY

SEQ ID NO: 23325 - protein, 10 aa, Severe acute respiratory syndrome coronavirus 2
  REGION 1..10: note = Table B: HLA-DQA1*05:05-B1*03:19L
TQQLIRAAEI

SEQ ID NO: 23326 - protein, 11 aa, Severe acute respiratory syndrome coronavirus 2
  REGION 1..11: note = Table B: HLA-DQA1*05:05-B1*03:19L
NFTTAPAICHD

SEQ ID NO: 23327 - protein, 10 aa, Severe acute respiratory syndrome coronavirus 2
  REGION 1..10: note = Table B: HLA-DQA1*05:05-B1*03:19L
FVSNGTHWFV

SEQ ID NO: 23328 - protein, 13 aa, Severe acute respiratory syndrome coronavirus 2
  REGION 1..13: note = Table B: HLA-DQA1*05:05-B1*03:19L
TDNTFVSGNCDVV

SEQ ID NO: 23329 - protein, 14 aa, Severe acute respiratory syndrome coronavirus 2
  REGION 1..14: note = Table B: HLA-DQA1*05:05-B1*03:19L HLA-DPA1*03:01-B1*105:01L
FVSGNCDVVIGIVN

SEQ ID NO: 23330 - protein, 11 aa, Severe acute respiratory syndrome coronavirus 2
  REGION 1..11: note = Table B: HLA-DQA1*05:05-B1*03:19L
YDPLQPELDSF

SEQ ID NO: 23331 - protein, 10 aa, Severe acute respiratory syndrome coronavirus 2
  REGION 1..10: note = Table B: HLA-DQA1*05:05-B1*03:19L HLA-DQA1*01:03-B1*06:01L
ASVVNIQKEI

SEQ ID NO: 23332 - protein, 10 aa, Severe acute respiratory syndrome coronavirus 2
  REGION 1..10: note = Table B: HLA-DQA1*05:05-B1*03:19L
QKEIDRLNEV

SEQ ID NO: 23333 - protein, 10 aa, Severe acute respiratory syndrome coronavirus 2
  REGION 1..10: note = Table B: HLA-DQA1*05:05-B1*03:19L HLA-DPA1*02:01-B1*13:01L HLA-DQA1*01:03-B1*06:01L
EQYIKWPWYI

SEQ ID NO: 23334 - protein, 10 aa, Severe acute respiratory syndrome coronavirus 2
  REGION 1..10: note = Table B: HLA-DQA1*05:05-B1*03:19M HLA-DPA1*01:03-B1*104:01L
MDLFMRIFTI

SEQ ID NO: 23335 - protein, 13 aa, Severe acute respiratory syndrome coronavirus 2
  REGION 1..13: note = Table B: HLA-DQA1*05:05-B1*03:19L
IFTIGTVTLKQGE

SEQ ID NO: 23336 - protein, 10 aa, Severe acute respiratory syndrome coronavirus 2
  REGION 1..10: note = Table B: HLA-DQA1*05:05-B1*03:19L
SDFVRATATI

SEQ ID NO: 23337 - protein, 10 aa, Severe acute respiratory syndrome coronavirus 2
  REGION 1..10: note = Table B: HLA-DQA1*05:05-B1*03:19L HLA-DRB1*16:01L HLA-DQA1*02:01-B1*03:03L
LALSKGVHFV

SEQ ID NO: 23338 - protein, 10 aa, Severe acute respiratory syndrome coronavirus 2
  REGION 1..10: note = Table B: HLA-DQA1*05:05-B1*03:19L
VTVYSHLLLV

SEQ ID NO: 23339 - protein, 10 aa, Severe acute respiratory syndrome coronavirus 2
  REGION 1..10: note = Table B: HLA-DQA1*05:05-B1*03:19L
LEAPFLYLYA

SEQ ID NO: 23340 - protein, 10 aa, Severe acute respiratory syndrome coronavirus 2
  REGION 1..10: note = Table B: HLA-DQA1*05:05-B1*03:19L HLA-DPA1*02:01-B1*13:01L HLA-DQA1*01:03-B1*06:01L HLA-DRB1*15:03L
VYFLQSINFV

SEQ ID NO: 23341 - protein, 10 aa, Severe acute respiratory syndrome coronavirus 2
  REGION 1..10: note = Table B: HLA-DQA1*05:05-B1*03:19L
KNPLLYDANY

SEQ ID NO: 23342 - protein, 13 aa, Severe acute respiratory syndrome coronavirus 2
  REGION 1..13: note = Table B: HLA-DQA1*05:05-B1*03:19L
NCYDYCIPYNSVT

SEQ ID NO: 23343 - protein, 13 aa, Severe acute respiratory syndrome coronavirus 2
  REGION 1..13: note = Table B: HLA-DQA1*05:05-B1*03:19L HLA-DQA1*05:05-B1*03:01L
SIVITSGDGTTSP

SEQ ID NO: 23344 - protein, 10 aa, Severe acute respiratory syndrome coronavirus 2
  REGION 1..10: note = Table B: HLA-DQA1*05:05-B1*03:19L HLA-DPA1*01:03-B1*104:01L
WESGVKDCVV

SEQ ID NO: 23345 - protein, 10 aa, Severe acute respiratory syndrome coronavirus 2
  REGION 1..10: note = Table B: HLA-DQA1*05:05-B1*03:19L HLA-DQA1*05:01-B1*02:01L
LHSYFTSDYY

SEQ ID NO: 23346 - protein, 10 aa, Severe acute respiratory syndrome coronavirus 2
  REGION 1..10: note = Table B: HLA-DQA1*05:05-B1*03:19L HLA-DPA1*01:03-B1*104:01L
VDEPEEHVQI

SEQ ID NO: 23347 - protein, 13 aa, Severe acute respiratory syndrome coronavirus 2
  REGION 1..13: note = Table B: HLA-DQA1*05:05-B1*03:19L HLA-DQA1*05:05-B1*03:01L HLA-DQA1*01:03-B1*06:01L
HTIDGSSGVVNPV

SEQ ID NO: 23348 - protein, 11 aa, Severe acute respiratory syndrome coronavirus 2
  REGION 1..11: note = Table B: HLA-DQA1*05:05-B1*03:19L
RINWITGGIAI

SEQ ID NO: 23349 - protein, 11 aa, Severe acute respiratory syndrome coronavirus 2
  REGION 1..11: note = Table B: HLA-DQA1*05:05-B1*03:19L
SMWSFNPETNI

SEQ ID NO: 23350 - protein, 18 aa, Severe acute respiratory syndrome coronavirus 2
  REGION 1..18: note = Table B: HLA-DQA1*05:05-B1*03:19L
IGAVILRGHLRIAGHHLG

SEQ ID NO: 23351 - protein, 10 aa, Severe acute respiratory syndrome coronavirus 2
  REGION 1..10: note = Table B: HLA-DQA1*05:05-B1*03:19L HLA-DRB1*16:01L
IKDLPKEITV

SEQ ID NO: 23352 - protein, 11 aa, Severe acute respiratory syndrome coronavirus 2
  REGION 1..11: note = Table B: HLA-DQA1*05:05-B1*03:19L
NTDHSSSSDNI

SEQ ID NO: 23353 - protein, 10 aa, Severe acute respiratory syndrome coronavirus 2
  REGION 1..10: note = Table B: HLA-DQA1*05:05-B1*03:19L HLA-DPA1*01:03-B1*104:01L
VDFQVTIAEI

SEQ ID NO: 23354 - protein, 19 aa, Severe acute respiratory syndrome coronavirus 2
  REGION 1..19: note = Table B: HLA-DQA1*05:05-B1*03:19L HLA-DRB1*09:01L HLA-DPA1*01:03-B1*104:01L
CPDGVKHVYQLRARSVSPK

SEQ ID NO: 23355 - protein, 19 aa, Severe acute respiratory syndrome coronavirus 2
  REGION 1..19: note = Table B: HLA-DQA1*05:05-B1*03:19L HLA-DPA1*01:03-B1*104:01L
PDGVKHVYQLRARSVSPKL

SEQ ID NO: 23356 - protein, 10 aa, Severe acute respiratory syndrome coronavirus 2
  REGION 1..10: note = Table B: HLA-DQA1*05:05-B1*03:19L HLA-DQA1*05:01-B1*02:01L
MIELSLIDFY

SEQ ID NO: 23357 - protein, 10 aa, Severe acute respiratory syndrome coronavirus 2
  REGION 1..10: note = Table B: HLA-DQA1*05:05-B1*03:19L
LELQDHNETC

SEQ ID NO: 23358 - protein, 15 aa, Severe acute respiratory syndrome coronavirus 2
  REGION 1..15: note = Table B: HLA-DQA1*05:05-B1*03:19L HLA-DQA1*01:03-B1*06:01L
VAAFHQECSLQSCTQ

SEQ ID NO: 23359 - protein, 11 aa, Severe acute respiratory syndrome coronavirus 2
  REGION 1..11: note = Table B: HLA-DQA1*05:05-B1*03:19L
RCSFYEDFLEY

SEQ ID NO: 23360 - protein, 13 aa, Severe acute respiratory syndrome coronavirus 2
  REGION 1..13: note = Table B: HLA-DQA1*05:05-B1*03:19L HLA-DQA1*05:05-B1*03:01L
PRITFGGPSDSTG

SEQ ID NO: 23361 - protein, 10 aa, Severe acute respiratory syndrome coronavirus 2
  REGION 1..10: note = Table B: HLA-DQA1*05:05-B1*03:19L
MKDLSPRWYF

SEQ ID NO: 23362 - protein, 12 aa, Severe acute respiratory syndrome coronavirus 2
  REGION 1..12: note = Table B: HLA-DQA1*05:05-B1*03:19L HLA-DQA1*05:05-B1*03:01L
YYLGTGPEAGLP

SEQ ID NO: 23363 - protein, 13 aa, Severe acute respiratory syndrome coronavirus 2
  REGION 1..13: note = Table B: HLA-DQA1*05:05-B1*03:19L HLA-DQA1*05:05-B1*03:01L HLA-DQA1*01:03-B1*06:01L
MAGNGGDAALALL

SEQ ID NO: 23364 - protein, 15 aa, Severe acute respiratory syndrome coronavirus 2
  REGION 1..15: note = Table B: HLA-DQA1*05:05-B1*03:19L HLA-DQA1*05:05-B1*03:01L HLA-DQA1*01:03-B1*06:01L
LESKMSGKGQQQQGQ

SEQ ID NO: 23365 - protein, 14 aa, Severe acute respiratory syndrome coronavirus 2
  REGION 1..14: note = Table B: HLA-DQA1*05:05-B1*03:19L HLA-DQA1*05:05-B1*03:01L
YNVTQAFGRRGPEQ

SEQ ID NO: 23366 - protein, 10 aa, Severe acute respiratory syndrome coronavirus 2
  REGION 1..10: note = Table B: HLA-DQA1*05:05-B1*03:19L HLA-DPA1*01:03-B1*104:01L
GTDYKHWPQI

SEQ ID NO: 23367 - protein, 14 aa, Severe acute respiratory syndrome coronavirus 2
  REGION 1..14: note = Table B: HLA-DQA1*05:05-B1*03:19L
FGMSRIGMEVTPSG

SEQ ID NO: 23368 - protein, 13 aa, Severe acute respiratory syndrome coronavirus 2
  REGION 1..13: note = Table B: HLA-DQA1*05:05-B1*03:19L HLA-DQA1*05:05-B1*03:01L HLA-DRB1*15:03L
DLDDFSKQLQQSM

SEQ ID NO: 23369 - protein, 11 aa, Severe acute respiratory syndrome coronavirus 2
  REGION 1..11: note = Table B: HLA-DQA1*05:05-B1*03:19L
YINVFAFPFTI

SEQ ID NO: 23370 - protein, 12 aa, Severe acute respiratory syndrome coronavirus 2
  REGION 1..12: note = Table B: HLA-DRB4*02:01NL HLA-DPA1*01:03-B1*02:01L
AGIFGADPIHSL

SEQ ID NO: 23371 - protein, 14 aa, Severe acute respiratory syndrome coronavirus 2
  REGION 1..14: note = Table B: HLA-DRB4*02:01NL HLA-DRB1*13:01L HLA-DPA1*01:03-B1*02:01L HLA-DRB1*08:02L HLA-DRB1*15:01L
LNGYTVEEAKTVLK

SEQ ID NO: 23372 - protein, 15 aa, Severe acute respiratory syndrome coronavirus 2
  REGION 1..15: note = Table B: HLA-DRB4*02:01NL
GARFYFYTSKTTVAS

SEQ ID NO: 23373 - protein, 14 aa, Severe acute respiratory syndrome coronavirus 2
  REGION 1..14: note = Table B: HLA-DRB4*02:01NL HLA-DQA1*05:05-B1*03:116L
NINLHTQVVDMSMT

SEQ ID NO: 23374 - protein, 12 aa, Severe acute respiratory syndrome coronavirus 2
  REGION 1..12: note = Table B: HLA-DRB4*02:01NL HLA-DRB4*01:01L HLA-DRB1*15:01L
AAYVDNSSLTIK

SEQ ID NO: 23375 - protein, 14 aa, Severe acute respiratory syndrome coronavirus 2
  REGION 1..14: note = Table B: HLA-DRB4*02:01NL HLA-DRB1*13:01L HLA-DRB4*01:01L HLA-DRB1*15:01L
AYVDNSSLTIKKPN

SEQ ID NO: 23376 - protein, 13 aa, Severe acute respiratory syndrome coronavirus 2
  REGION 1..13: note = Table B: HLA-DRB4*02:01NL HLA-DRB1*07:01L HLA-DRB1*15:01L
VYAADPAMHAASG

SEQ ID NO: 23377 - protein, 12 aa, Severe acute respiratory syndrome coronavirus 2
  REGION 1..12: note = Table B: HLA-DRB4*02:01NL HLA-DRB3*01:01L
NALLSTDGNKIA

SEQ ID NO: 23378 - protein, 15 aa, Severe acute respiratory syndrome coronavirus 2
  REGION 1..15: note = Table B: HLA-DRB4*02:01NL
VASKILGLPTQTVDS

SEQ ID NO: 23379 - protein, 15 aa, Severe acute respiratory syndrome coronavirus 2
  REGION 1..15: note = Table B: HLA-DRB4*02:01NL HLA-DRB1*13:01L HLA-DPA1*01:03-B1*02:01L HLA-DRB1*15:01L
GVLITEGSVKGLQPS

SEQ ID NO: 23380 - protein, 15 aa, Severe acute respiratory syndrome coronavirus 2
  REGION 1..15: note = Table B: HLA-DRB4*02:01NL HLA-DPA1*01:03-B1*04:01L HLA-DRB1*15:01L
SFVIRGDEVRQIAPG

SEQ ID NO: 23381 - protein, 14 aa, Severe acute respiratory syndrome coronavirus 2
  REGION 1..14: note = Table B: HLA-DRB4*02:01NL HLA-DPA1*01:03-B1*02:01L HLA-DRB1*08:02L HLA-DRB1*15:01L
LKPFERDISTEIYQ

SEQ ID NO: 23382 - protein, 16 aa, Severe acute respiratory syndrome coronavirus 2
  REGION 1..16: note = Table B: HLA-DRB4*02:01NL
GGFNFSQILPDPSKPS

SEQ ID NO: 23383 - protein, 15 aa, Severe acute respiratory syndrome coronavirus 2
  REGION 1..15: note = Table B: HLA-DRB4*02:01NL HLA-DQA1*05:05-B1*03:116L HLA-DRB1*15:01L
IEDLLFNKVTLADAG

SEQ ID NO: 23384 - protein, 13 aa, Severe acute respiratory syndrome coronavirus 2
  REGION 1..13: note = Table B: HLA-DRB4*02:01NL
IDGSSGVVNPVME

SEQ ID NO: 23385 - protein, 14 aa, Severe acute respiratory syndrome coronavirus 2
  REGION 1..14: note = Table B: HLA-DRB4*02:01NL
SRNYIAQVDVVNFN

SEQ ID NO: 23386 - protein, 15 aa, Severe acute respiratory syndrome coronavirus 2
  REGION 1..15: note = Table B: HLA-DRB5*02:02L
SDDYIATNGPLKVGG

SEQ ID NO: 23387 - protein, 15 aa, Severe acute respiratory syndrome coronavirus 2
  REGION 1..15: note = Table B: HLA-DRB5*02:02L
AGSTFISDEVARDLS

SEQ ID NO: 23388 - protein, 13 aa, Severe acute respiratory syndrome coronavirus 2
  REGION 1..13: note = Table B: HLA-DRB5*02:02L
VSDVGDSAEVAVK

SEQ ID NO: 23389 - protein, 16 aa, Severe acute respiratory syndrome coronavirus 2
  REGION 1..16: note = Table B: HLA-DRB5*02:02L HLA-DRB1*15:01L
IQQVVDADSKIVQLSE

SEQ ID NO: 23390 - protein, 18 aa, Severe acute respiratory syndrome coronavirus 2
  REGION 1..18: note = Table B: HLA-DRB5*02:02L
DFGDFIQTTPGSGVPVVD

SEQ ID NO: 23391 - protein, 14 aa, Severe acute respiratory syndrome coronavirus 2
  REGION 1..14: note = Table B: HLA-DRB5*02:02L
ISDEFSSNVANYQK

SEQ ID NO: 23392 - protein, 15 aa, Severe acute respiratory syndrome coronavirus 2
  REGION 1..15: note = Table B: HLA-DRB5*02:02L HLA-DQA1*05:05-B1*03:116L
EPQIITTDNTFVSGN

SEQ ID NO: 23393 - protein, 14 aa, Severe acute respiratory syndrome coronavirus 2
  REGION 1..14: note = Table B: HLA-DRB5*02:02L
PSDFVRATATIPIQ

SEQ ID NO: 23394 - protein, 14 aa, Severe acute respiratory syndrome coronavirus 2
  REGION 1..14: note = Table B: HLA-DRB5*02:02L
DFVRATATIPIQAS

SEQ ID NO: 23395 - protein, 16 aa, Severe acute respiratory syndrome coronavirus 2
  REGION 1..16: note = Table B: HLA-DRB5*02:02L HLA-DQA1*05:05-B1*03:116L
TGAIKLDDKDPNFKDQ

SEQ ID NO: 23396 - protein, 11 aa, Severe acute respiratory syndrome coronavirus 2
  REGION 1..11: note = Table B: HLA-DQA1*05:01-B1*02:01L HLA-DQA1*01:03-B1*06:01L
VELVAELEGIQ

SEQ ID NO: 23397 - protein, 11 aa, Severe acute respiratory syndrome coronavirus 2
  REGION 1..11: note = Table B: HLA-DQA1*05:01-B1*02:01L HLA-DRB1*16:01L HLA-DQA1*01:03-B1*06:01L HLA-DQA1*02:01-B1*03:03L
ADLKSFDLGDE

SEQ ID NO: 23398 - protein, 12 aa, Severe acute respiratory syndrome coronavirus 2
  REGION 1..12: note = Table B: HLA-DQA1*05:01-B1*02:01L
DLKSFDLGDELG

SEQ ID NO: 23399 - protein, 14 aa, Severe acute respiratory syndrome coronavirus 2
  REGION 1..14: note = Table B: HLA-DQA1*05:01-B1*02:01L
LKSFDLGDELGTDP

SEQ ID NO: 23400 - protein, 11 aa, Severe acute respiratory syndrome coronavirus 2
  REGION 1..11: note = Table B: HLA-DQA1*05:01-B1*02:01L HLA-DQA1*03:01-B1*03:02L
GDELGTDPYED

SEQ ID NO: 23401 - protein, 11 aa, Severe acute respiratory syndrome coronavirus 2
  REGION 1..11: note = Table B: HLA-DQA1*05:01-B1*02:01L
DPYEDFQENWN

SEQ ID NO: 23402 - protein, 11 aa, Severe acute respiratory syndrome coronavirus 2
  REGION 1..11: note = Table B: HLA-DQA1*05:01-B1*02:01L HLA-DRB1*12:01L HLA-DPA1*03:01-B1*105:01L
GAYTRYVDNNF

SEQ ID NO: 23403 - protein, 12 aa, Severe acute respiratory syndrome coronavirus 2
  REGION 1..12: note = Table B: HLA-DQA1*05:01-B1*02:01L
FDTFNGECPNFV

SEQ ID NO: 23404 - protein, 12 aa, Severe acute respiratory syndrome coronavirus 2
  REGION 1..12: note = Table B: HLA-DQA1*05:01-B1*02:01L HLA-DPA1*03:01-B1*105:01L
HTGVVGEGSEGL

SEQ ID NO: 23405 - protein, 11 aa, Severe acute respiratory syndrome coronavirus 2
  REGION 1..11: note = Table B: HLA-DQA1*05:01-B1*02:01L
GVVGEGSEGLN

SEQ ID NO: 23406 - protein, 12 aa, Severe acute respiratory syndrome coronavirus 2
  REGION 1..12: note = Table B: HLA-DQA1*05:01-B1*02:01L
VGEGSEGLNDNL

SEQ ID NO: 23407 - protein, 11 aa, Severe acute respiratory syndrome coronavirus 2
  REGION 1..11: note = Table B: HLA-DQA1*05:01-B1*02:01L HLA-DQA1*03:01-B1*03:02L
EGSEGLNDNLL

SEQ ID NO: 23408 - protein, 11 aa, Severe acute respiratory syndrome coronavirus 2
  REGION 1..11: note = Table B: HLA-DQA1*05:01-B1*02:01L
GSEGLNDNLLE

SEQ ID NO: 23409 - protein, 12 aa, Severe acute respiratory syndrome coronavirus 2
  REGION 1..12: note = Table B: HLA-DQA1*05:01-B1*02:01L
SEGLNDNLLEIL

SEQ ID NO: 23410 - protein, 11 aa, Severe acute respiratory syndrome coronavirus 2
  REGION 1..11: note = Table B: HLA-DQA1*05:01-B1*02:01L HLA-DPA1*03:01-B1*105:01L
SQYSLRLIDAM

SEQ ID NO: 23411 - protein, 10 aa, Severe acute respiratory syndrome coronavirus 2
  REGION 1..10: note = Table B: HLA-DQA1*05:01-B1*02:01L HLA-DPA1*03:01-B1*105:01L HLA-DQA1*03:01-B1*03:02L HLA-DQA1*01:03-B1*06:01L HLA-DQA1*02:01-B1*03:03L
MFTSDLATNN

SEQ ID NO: 23412 - protein, 12 aa, Severe acute respiratory syndrome coronavirus 2
  REGION 1..12: note = Table B: HLA-DQA1*05:01-B1*02:01L HLA-DPA1*03:01-B1*105:01L
GLLMPLKAPKEI

SEQ ID NO: 23413 - protein, 12 aa, Severe acute respiratory syndrome coronavirus 2
  REGION 1..12: note = Table B: HLA-DQA1*05:01-B1*02:01L HLA-DPA1*03:01-B1*105:01L
IFLEGETLPTEV

SEQ ID NO: 23414 - protein, 12 aa, Severe acute respiratory syndrome coronavirus 2
  REGION 1..12: note = Table B: HLA-DQA1*05:01-B1*02:01L
ETLPTEVLTEEV

SEQ ID NO: 23415 - protein, 12 aa, Severe acute respiratory syndrome coronavirus 2
  REGION 1..12: note = Table B: HLA-DQA1*05:01-B1*02:01L
APTKVTFGDDTV

SEQ ID NO: 23416 - protein, 11 aa, Severe acute respiratory syndrome coronavirus 2
  REGION 1..11: note = Table B: HLA-DQA1*05:01-B1*02:01L HLA-DQA1*03:01-B1*03:02L
FGDDTVIEVQG

SEQ ID NO: 23417 - protein, 11 aa, Severe acute respiratory syndrome coronavirus 2
  REGION 1..11: note = Table B: HLA-DQA1*05:01-B1*02:01L HLA-DRB1*12:01L HLA-DRB1*14:17L
EVQGYKSVNIT

SEQ ID NO: 23418 - protein, 11 aa, Severe acute respiratory syndrome coronavirus 2
  REGION 1..11: note = Table B: HLA-DQA1*05:01-B1*02:01L HLA-DPA1*03:01-B1*105:01L HLA-DQA1*02:01-B1*03:03L
AYTVELGTEVN

SEQ ID NO: 23419 - protein, 12 aa, Severe acute respiratory syndrome coronavirus 2
  REGION 1..12: note = Table B: HLA-DQA1*05:01-B1*02:01L HLA-DQA1*03:01-B1*03:02L
SFYPPDEDEEEG

SEQ ID NO: 23420 - protein, 15 aa, Severe acute respiratory syndrome coronavirus 2
  REGION 1..15: note = Table B: HLA-DQA1*05:01-B1*02:01L HLA-DQA1*03:01-B1*03:02L
YPPDEDEEEGDCEEE

SEQ ID NO: 23421 - protein, 17 aa, Severe acute respiratory syndrome coronavirus 2
  REGION 1..17: note = Table B: HLA-DQA1*05:01-B1*02:01L
PPDEDEEEGDCEEEEFE

SEQ ID NO: 23422 - protein, 14 aa, Severe acute respiratory syndrome coronavirus 2
  REGION 1..14: note = Table B: HLA-DQA1*05:01-B1*02:01L
DEEEGDCEEEEFEP

SEQ ID NO: 23423 - protein, 13 aa, Severe acute respiratory syndrome coronavirus 2
  REGION 1..13: note = Table B: HLA-DQA1*05:01-B1*02:01L
EEGDCEEEEFEPS

SEQ ID NO: 23424 - protein, 14 aa, Severe acute respiratory syndrome coronavirus 2
  REGION 1..14: note = Table B: HLA-DQA1*05:01-B1*02:01L
EGDCEEEEFEPSTQ

SEQ ID NO: 23425 - protein, 12 aa, Severe acute respiratory syndrome coronavirus 2
  REGION 1..12: note = Table B: HLA-DQA1*05:01-B1*02:01L HLA-DQA1*03:01-B1*03:02L
FEPSTQYEYGTE

SEQ ID NO: 23426 - protein, 10 aa, Severe acute respiratory syndrome coronavirus 2
  REGION 1..10: note = Table B: HLA-DQA1*05:01-B1*02:01L HLA-DQA1*03:01-B1*03:02L
AALQPEEEQE

SEQ ID NO: 23427 - protein, 10 aa, Severe acute respiratory syndrome coronavirus 2
  REGION 1..10: note = Table B: HLA-DQA1*05:01-B1*02:01L HLA-DQA1*03:01-B1*03:02L
ALQPEEEQEE

SEQ ID NO: 23428 - protein, 14 aa, Severe acute respiratory syndrome coronavirus 2
  REGION 1..14: note = Table B: HLA-DQA1*05:01-B1*02:01L
PEEEQEEDWLDDDS

SEQ ID NO: 23429 - protein, 12 aa, Severe acute respiratory syndrome coronavirus 2
  REGION 1..12: note = Table B: HLA-DQA1*05:01-B1*02:01L
EQEEDWLDDDSQ

SEQ ID NO: 23430 - protein, 12 aa, Severe acute respiratory syndrome coronavirus 2
  REGION 1..12: note = Table B: HLA-DQA1*05:01-B1*02:01L
QEEDWLDDDSQQ

SEQ ID NO: 23431 - protein, 12 aa, Severe acute respiratory syndrome coronavirus 2
  REGION 1..12: note = Table B: HLA-DQA1*05:01-B1*02:01L HLA-DQA1*03:01-B1*03:02L
EEDWLDDDSQQT

SEQ ID NO: 23432 - protein, 13 aa, Severe acute respiratory syndrome coronavirus 2
  REGION 1..13: note = Table B: HLA-DQA1*05:01-B1*02:01L
LDDDSQQTVGQQD

SEQ ID NO: 23433 - protein, 12 aa, Severe acute respiratory syndrome coronavirus 2
  REGION 1..12: note = Table B: HLA-DQA1*05:01-B1*02:01L HLA-DQA1*03:01-B1*03:02L HLA-DQA1*01:03-B1*06:01L
TDNVYIKNADIV

SEQ ID NO: 23434 - protein, 12 aa, Severe acute respiratory syndrome coronavirus 2
  REGION 1..12: note = Table B: HLA-DQA1*05:01-B1*02:01L
VESDDYIATNGP

SEQ ID NO: 23435 - protein, 11 aa, Severe acute respiratory syndrome coronavirus 2
  REGION 1..11: note = Table B: HLA-DQA1*05:01-B1*02:01L
SATLVSDIDIT

SEQ ID NO: 23436 - protein, 11 aa, Severe acute respiratory syndrome coronavirus 2
  REGION 1..11: note = Table B: HLA-DQA1*05:01-B1*02:01L HLA-DPA1*03:01-B1*105:01L
LVSDIDITFLK

SEQ ID NO: 23437 - protein, 12 aa, Severe acute respiratory syndrome coronavirus 2
  REGION 1..12: note = Table B: HLA-DQA1*05:01-B1*02:01L HLA-DPA1*03:01-B1*105:01L
PYIVGDVVQEGV

SEQ ID NO: 23438 - protein, 13 aa, Severe acute respiratory syndrome coronavirus 2
  REGION 1..13: note = Table B: HLA-DQA1*05:01-B1*02:01L HLA-DQA1*03:01-B1*03:02L HLA-DQA1*01:03-B1*06:01L
NDLNETLVTMPLG

SEQ ID NO: 23439 - protein, 11 aa, Severe acute respiratory syndrome coronavirus 2
  REGION 1..11: note = Table B: HLA-DQA1*05:01-B1*02:01L
TVSVSSPDAVT

SEQ ID NO: 23440 - protein, 11 aa, Severe acute respiratory syndrome coronavirus 2
  REGION 1..11: note = Table B: HLA-DQA1*05:01-B1*02:01L
TPEEHFIETIS

SEQ ID NO: 23441 - protein, 12 aa, Severe acute respiratory syndrome coronavirus 2
  REGION 1..12: note = Table B: HLA-DQA1*05:01-B1*02:01L HLA-DQA1*05:05-B1*03:01L HLA-DQA1*01:03-B1*06:01L
DWSYSGQSTQLG

SEQ ID NO: 23442 - protein, 12 aa, Severe acute respiratory syndrome coronavirus 2
  REGION 1..12: note = Table B: HLA-DQA1*05:01-B1*02:01L HLA-DQA1*03:01-B1*03:02L
SNPTTFHLDGEV

SEQ ID NO: 23443 - protein, 12 aa, Severe acute respiratory syndrome coronavirus 2
  REGION 1..12: note = Table B: HLA-DQA1*05:01-B1*02:01L HLA-DQA1*03:01-B1*03:02L
NPTTFHLDGEVI

SEQ ID NO: 23444 - protein, 13 aa, Severe acute respiratory syndrome coronavirus 2
  REGION 1..13: note = Table B: HLA-DQA1*05:01-B1*02:01L HLA-DPA1*03:01-B1*105:01L
LDGVVCTEIDPKL

SEQ ID NO: 23445 - protein, 11 aa, Severe acute respiratory syndrome coronavirus 2
  REGION 1..11: note = Table B: HLA-DQA1*05:01-B1*02:01L HLA-DPA1*01:03-B1*04:02L HLA-DRB1*16:01L
ELKVTFFPDLN

SEQ ID NO: 23446 - protein, 12 aa, Severe acute respiratory syndrome coronavirus 2
  REGION 1..12: note = Table B: HLA-DQA1*05:01-B1*02:01L HLA-DQA1*03:01-B1*03:02L
FPDLNGDVVAID

SEQ ID NO: 23447 - protein, 11 aa, Severe acute respiratory syndrome coronavirus 2
  REGION 1..11: note = Table B: HLA-DQA1*05:01-B1*02:01L
SEEVVENPTIQ

SEQ ID NO: 23448 - protein, 12 aa, Severe acute respiratory syndrome coronavirus 2
  REGION 1..12: note = Table B: HLA-DQA1*05:01-B1*02:01L
LAAVNSVPWDTI

SEQ ID NO: 23449 - protein, 11 aa, Severe acute respiratory syndrome coronavirus 2
  REGION 1..11: note = Table B: HLA-DQA1*05:01-B1*02:01L
DSVTVKNGSIH

SEQ ID NO: 23450 - protein, 12 aa, Severe acute respiratory syndrome coronavirus 2
  REGION 1..12: note = Table B: HLA-DQA1*05:01-B1*02:01L HLA-DQA1*03:01-B1*03:02L HLA-DQA1*01:03-B1*06:01L
NVKDFMSLSEQL

SEQ ID NO: 23451 - protein, 10 aa, Severe acute respiratory syndrome coronavirus 2
  REGION 1..10: note = Table B: HLA-DQA1*05:01-B1*02:01L HLA-DRB1*12:01L HLA-DRB1*16:01L HLA-DQA1*02:01-B1*03:03L HLA-DRB1*15:03L
ICYTPSKLIE

SEQ ID NO: 23452 - protein, 11 aa, Severe acute respiratory syndrome coronavirus 2
  REGION 1..11: note = Table B: HLA-DQA1*05:01-B1*02:01L HLA-DPA1*03:01-B1*105:01L HLA-DRB1*15:03L
LPGVYSVIYLY

SEQ ID NO: 23453 - protein, 13 aa, Severe acute respiratory syndrome coronavirus 2
  REGION 1..13: note = Table B: HLA-DQA1*05:01-B1*02:01L
TTTLNGLWLDDVV

SEQ ID NO: 23454 - protein, 12 aa, Severe acute respiratory syndrome coronavirus 2
  REGION 1..12: note = Table B: HLA-DQA1*05:01-B1*02:01L HLA-DQA1*01:03-B1*06:01L
DLEGNFYGPFVD

SEQ ID NO: 23455 - protein, 12 aa, Severe acute respiratory syndrome coronavirus 2
  REGION 1..12: note = Table B: HLA-DQA1*05:01-B1*02:01L HLA-DPA1*03:01-B1*105:01L HLA-DRB1*15:03L
NFYGPFVDRQTA

SEQ ID NO: 23456 - protein, 13 aa, Severe acute respiratory syndrome coronavirus 2
  REGION 1..13: note = Table B: HLA-DQA1*05:01-B1*02:01L
PLTQDHVDILGPL

SEQ ID NO: 23457 - protein, 11 aa, Severe acute respiratory syndrome coronavirus 2
  REGION 1..11: note = Table B: HLA-DQA1*05:01-B1*02:01L HLA-DRB4*01:01L HLA-DRB1*12:01L HLA-DQA1*02:01-B1*03:03L
SLLVLVQSTQW

SEQ ID NO: 23458 - protein, 10 aa, Severe acute respiratory syndrome coronavirus 2
  REGION 1..10: note = Table B: HLA-DQA1*05:01-B1*02:01L HLA-DRB1*12:01L HLA-DRB1*15:03L
GIIAMSAFAM

SEQ ID NO: 23459 - protein, 13 aa, Severe acute respiratory syndrome coronavirus 2
  REGION 1..13: note = Table B: HLA-DQA1*05:01-B1*02:01L HLA-DPA1*01:03-B1*04:02L HLA-DRB1*15:03L
VAYFNMVYMPASW

SEQ ID NO: 23460 - protein, 13 aa, Severe acute respiratory syndrome coronavirus 2
  REGION 1..13: note = Table B: HLA-DQA1*05:01-B1*02:01L
FNMVYMPASWVMR

SEQ ID NO: 23461 - protein, 12 aa, Severe acute respiratory syndrome coronavirus 2
  REGION 1..12: note = Table B: HLA-DQA1*05:01-B1*02:01L HLA-DPA1*03:01-B1*105:01L
QQLRVESSSKLW

SEQ ID NO: 23462 - protein, 11 aa, Severe acute respiratory syndrome coronavirus 2
  REGION 1..11: note = Table B: HLA-DQA1*05:01-B1*02:01L HLA-DQA1*01:03-B1*06:01L
AKDTTEAFEKM

SEQ ID NO: 23463 - protein, 13 aa, Severe acute respiratory syndrome coronavirus 2
  REGION 1..13: note = Table B: HLA-DQA1*05:01-B1*02:01L HLA-DRB1*12:01L
GAVDINKLCEEML

SEQ ID NO: 23464 - protein, 11 aa, Severe acute respiratory syndrome coronavirus 2
  REGION 1..11: note = Table B: HLA-DQA1*05:01-B1*02:01L HLA-DPA1*01:02-B1*04:01L
VVIPDYNTYKN

SEQ ID NO: 23465 - protein, 10 aa, Severe acute respiratory syndrome coronavirus 2
  REGION 1..10: note = Table B: HLA-DQA1*05:01-B1*02:01L HLA-DRB1*12:01L HLA-DRB1*15:03L
IVQLSEISMD

SEQ ID NO: 23466 - protein, 11 aa, Severe acute respiratory syndrome coronavirus 2
  REGION 1..11: note = Table B: HLA-DQA1*05:01-B1*02:01L
EISMDNSPNLA

SEQ ID NO: 23467 - protein, 11 aa, Severe acute respiratory syndrome coronavirus 2
  REGION 1..11: note = Table B: HLA-DQA1*05:01-B1*02:01L
LQNNELSPVAL

SEQ ID NO: 23468 - protein, 10 aa, Severe acute respiratory syndrome coronavirus 2
  REGION 1..10: note = Table B: HLA-DQA1*05:01-B1*02:01L HLA-DQA1*03:01-B1*03:02L
AITVTPEANM

SEQ ID NO: 23469 - protein, 16 aa, Severe acute respiratory syndrome coronavirus 2
  REGION 1..16: note = Table B: HLA-DQA1*05:01-B1*02:01L HLA-DPA1*01:03-B1*04:01L
IDSYFVVKRHTFSNYQ

SEQ ID NO: 23470 - protein, 18 aa, Severe acute respiratory syndrome coronavirus 2
  REGION 1..18: note = Table B: HLA-DQA1*05:01-B1*02:01L HLA-DPA1*01:03-B1*104:01L
DSYFVVKRHTFSNYQHEE

SEQ ID NO: 23471 - protein, 16 aa, Severe acute respiratory syndrome coronavirus 2
  REGION 1..16: note = Table B: HLA-DQA1*05:01-B1*02:01L
FVVKRHTFSNYQHEET

SEQ ID NO: 23472 - protein, 17 aa, Severe acute respiratory syndrome coronavirus 2
  REGION 1..17: note = Table B: HLA-DQA1*05:01-B1*02:01L
IYNLLKDCPAVAKHDFF

SEQ ID NO: 23473 - protein, 11 aa, Severe acute respiratory syndrome coronavirus 2
  REGION 1..11: note = Table B: HLA-DQA1*05:01-B1*02:01L HLA-DQA1*03:01-B1*03:02L
KDWYDFVENPD

SEQ ID NO: 23474 - protein, 11 aa, Severe acute respiratory syndrome coronavirus 2
  REGION 1..11: note = Table B: HLA-DQA1*05:01-B1*02:01L
DWYDFVENPDI

SEQ ID NO: 23475 - protein, 14 aa, Severe acute respiratory syndrome coronavirus 2
  REGION 1..14: note = Table B: HLA-DQA1*05:01-B1*02:01L
NQDLNGNWYDFGDF

SEQ ID NO: 23476 - protein, 12 aa, Severe acute respiratory syndrome coronavirus 2
  REGION 1..12: note = Table B: HLA-DQA1*05:01-B1*02:01L
NGNWYDFGDFIQ

SEQ ID NO: 23477 - protein, 13 aa, Severe acute respiratory syndrome coronavirus 2
  REGION 1..13: note = Table B: HLA-DQA1*05:01-B1*02:01L HLA-DRB1*12:01L HLA-DRB1*15:03L
TLTRALTAESHVD

SEQ ID NO: 23478 - protein, 10 aa, Severe acute respiratory syndrome coronavirus 2
  REGION 1..10: note = Table B: HLA-DQA1*05:01-B1*02:01L HLA-DQA1*03:01-B1*03:02L HLA-DQA1*01:03-B1*06:01L HLA-DQA1*02:01-B1*03:03L
LTAESHVDTD

SEQ ID NO: 23479 - protein, 11 aa, Severe acute respiratory syndrome coronavirus 2
  REGION 1..11: note = Table B: HLA-DQA1*05:01-B1*02:01L
TAESHVDTDLT

SEQ ID NO: 23480 - protein, 15 aa, Severe acute respiratory syndrome coronavirus 2
  REGION 1..15: note = Table B: HLA-DQA1*05:01-B1*02:01L
KPYIKWDLLKYDFTE

SEQ ID NO: 23481 - protein, 11 aa, Severe acute respiratory syndrome coronavirus 2
  REGION 1..11: note = Table B: HLA-DQA1*05:01-B1*02:01L HLA-DPA1*01:03-B1*04:02L
GFFKEGSSVEL

SEQ ID NO: 23482 - protein, 11 aa, Severe acute respiratory syndrome coronavirus 2
  REGION 1..11: note = Table B: HLA-DQA1*05:01-B1*02:01L
YDYYRYNLPTM

SEQ ID NO: 23483 - protein, 11 aa, Severe acute respiratory syndrome coronavirus 2
  REGION 1..11: note = Table B: HLA-DQA1*05:01-B1*02:01L HLA-DQA1*01:03-B1*06:01L
NANQVIVNNLD

SEQ ID NO: 23484 - protein, 12 aa, Severe acute respiratory syndrome coronavirus 2
  REGION 1..12: note = Table B: HLA-DQA1*05:01-B1*02:01L HLA-DPA1*03:01-B1*105:01L
LYYDSMSYEDQD

SEQ ID NO: 23485 - protein, 11 aa, Severe acute respiratory syndrome coronavirus 2
  REGION 1..11: note = Table B: HLA-DQA1*05:01-B1*02:01L
YDSMSYEDQDA

SEQ ID NO: 23486 - protein, 14 aa, Severe acute respiratory syndrome coronavirus 2
  REGION 1..14: note = Table B: HLA-DQA1*05:01-B1*02:01L
VKPGGTSSGDATTA

SEQ ID NO: 23487 - protein, 17 aa, Severe acute respiratory syndrome coronavirus 2
  REGION 1..17: note = Table B: HLA-DQA1*05:01-B1*02:01L HLA-DPA1*01:03-B1*04:01L
GPHEFCSQHTMLVKQGD

SEQ ID NO: 23488 - protein, 14 aa, Severe acute respiratory syndrome coronavirus 2
  REGION 1..14: note = Table B: HLA-DQA1*05:01-B1*02:01L HLA-DRB1*16:01L HLA-DRB1*15:03L
GAGCFVDDIVKTDG

SEQ ID NO: 23489 - protein, 17 aa, Severe acute respiratory syndrome coronavirus 2
  REGION 1..17: note = Table B: HLA-DQA1*05:01-B1*02:01L HLA-DPA1*01:03-B1*04:02L HLA-DPA1*01:03-B1*104:01L
DHVISTSHKLVLSVNPY

SEQ ID NO: 23490 - protein, 11 aa, Severe acute respiratory syndrome coronavirus 2
  REGION 1..11: note = Table B: HLA-DQA1*05:01-B1*02:01L
VDALCEKALKY

SEQ ID NO: 23491 - protein, 12 aa, Severe acute respiratory syndrome coronavirus 2
  REGION 1..12: note = Table B: HLA-DQA1*05:01-B1*02:01L HLA-DQA1*01:03-B1*06:01L
TVNALPETTADI

SEQ ID NO: 23492 - protein, 12 aa, Severe acute respiratory syndrome coronavirus 2
  REGION 1..12: note = Table B: HLA-DQA1*05:01-B1*02:01L HLA-DQA1*03:01-B1*03:02L HLA-DQA1*02:01-B1*03:03L
TTADIVVFDEIS

SEQ ID NO: 23493 - protein, 11 aa, Severe acute respiratory syndrome coronavirus 2
  REGION 1..11: note = Table B: HLA-DQA1*05:01-B1*02:01L
TVSALVYDNKL

SEQ ID NO: 23494 - protein, 13 aa, Severe acute respiratory syndrome coronavirus 2
  REGION 1..13: note = Table B: HLA-DQA1*05:01-B1*02:01L HLA-DRB1*14:17L
FSTGVNLVAVPTG

SEQ ID NO: 23495 - protein, 12 aa, Severe acute respiratory syndrome coronavirus 2
  REGION 1..12: note = Table B: HLA-DQA1*05:01-B1*02:01L
PTGYVDTPNNTD

SEQ ID NO: 23496 - protein, 12 aa, Severe acute respiratory syndrome coronavirus 2
  REGION 1..12: note = Table B: HLA-DQA1*05:01-B1*02:01L
DTPNNTDFSRVS

SEQ ID NO: 23497 - protein, 17 aa, Severe acute respiratory syndrome coronavirus 2
  REGION 1..17: note = Table B: HLA-DQA1*05:01-B1*02:01L
GGSLYVNKHAFHTPAFD

SEQ ID NO: 23498 - protein, 12 aa, Severe acute respiratory syndrome coronavirus 2
  REGION 1..12: note = Table B: HLA-DQA1*05:01-B1*02:01L
TVFFDGRVDGQV

SEQ ID NO: 23499 - protein, 12 aa, Severe acute respiratory syndrome coronavirus 2
  REGION 1..12: note = Table B: HLA-DQA1*05:01-B1*02:01L
DSDLNDFVSDAD

SEQ ID NO: 23500 - protein, 12 aa, Severe acute respiratory syndrome coronavirus 2
  REGION 1..12: note = Table B: HLA-DQA1*05:01-B1*02:01L HLA-DQA1*03:01-B1*03:02L
DLNDFVSDADST

SEQ ID NO: 23501 - protein, 11 aa, Severe acute respiratory syndrome coronavirus 2
  REGION 1..11: note = Table B: HLA-DQA1*05:01-B1*02:01L HLA-DQA1*01:03-B1*06:01L
LKEGQINDMIL

SEQ ID NO: 23502 - protein, 11 aa, Severe acute respiratory syndrome coronavirus 2
  REGION 1..11: note = Table B: HLA-DQA1*05:01-B1*02:01L
TAGAAAYYVGY

SEQ ID NO: 23503 - protein, 13 aa, Severe acute respiratory syndrome coronavirus 2
  REGION 1..13: note = Table B: HLA-DQA1*05:01-B1*02:01L
TITDAVDCALDPL

SEQ ID NO: 23504 - protein, 12 aa, Severe acute respiratory syndrome coronavirus 2
  REGION 1..12: note = Table B: HLA-DQA1*05:01-B1*02:01L
QFGRDIADTTDA

SEQ ID NO: 23505 - protein, 13 aa, Severe acute respiratory syndrome coronavirus 2
  REGION 1..13: note = Table B: HLA-DQA1*05:01-B1*02:01L HLA-DRB1*04:08L
SVAYSNNSIAIPT

SEQ ID NO: 23506 - protein, 13 aa, Severe acute respiratory syndrome coronavirus 2
  REGION 1..13: note = Table B: HLA-DQA1*05:01-B1*02:01L
IPTNFTISVTTEI

SEQ ID NO: 23507 - protein, 19 aa, Severe acute respiratory syndrome coronavirus 2
  REGION 1..19: note = Table B: HLA-DQA1*05:01-B1*02:01L
LPDPSKPSKRSFIEDLLFN

SEQ ID NO: 23508 - protein, 12 aa, Severe acute respiratory syndrome coronavirus 2
  REGION 1..12: note = Table B: HLA-DQA1*05:01-B1*02:01L HLA-DRB1*12:01L HLA-DPA1*03:01-B1*105:01L HLA-DRB1*16:01L HLA-DRB1*15:03L
VTQNVLYENQKL

SEQ ID NO: 23509 - protein, 12 aa, Severe acute respiratory syndrome coronavirus 2
  REGION 1..12: note = Table B: HLA-DQA1*05:01-B1*02:01L HLA-DPA1*02:01-B1*13:01L
VTQRNFYEPQII

SEQ ID NO: 23510 - protein, 12 aa, Severe acute respiratory syndrome coronavirus 2
  REGION 1..12: note = Table B: HLA-DQA1*05:01-B1*02:01L HLA-DQA1*03:01-B1*03:02L HLA-DRB1*16:01L HLA-DRB1*15:03L
TQRNFYEPQIIT

SEQ ID NO: 23511 - protein, 11 aa, Severe acute respiratory syndrome coronavirus 2
  REGION 1..11: note = Table B: HLA-DQA1*05:01-B1*02:01L
IVNNTVYDPLQ

SEQ ID NO: 23512 - protein, 12 aa, Severe acute respiratory syndrome coronavirus 2
  REGION 1..12: note = Table B: HLA-DQA1*05:01-B1*02:01L HLA-DPA1*02:01-B1*13:01L HLA-DQA1*03:01-B1*03:02L
AKNLNESLIDLQ

SEQ ID NO: 23513 - protein, 12 aa, Severe acute respiratory syndrome coronavirus 2
  REGION 1..12: note = Table B: HLA-DQA1*05:01-B1*02:01L
NLNESLIDLQEL

SEQ ID NO: 23514 - protein, 11 aa, Severe acute respiratory syndrome coronavirus 2
  REGION 1..11: note = Table B: HLA-DQA1*05:01-B1*02:01L
SKNPLLYDANY

SEQ ID NO: 23515 - protein, 11 aa, Severe acute respiratory syndrome coronavirus 2
  REGION 1..11: note = Table B: HLA-DQA1*05:01-B1*02:01L
IPYNSVTSSIV

SEQ ID NO: 23516 - protein, 12 aa, Severe acute respiratory syndrome coronavirus 2
  REGION 1..12: note = Table B: HLA-DQA1*05:01-B1*02:01L
MEPIYDEPTTTT

SEQ ID NO: 23517 - protein, 12 aa, Severe acute respiratory syndrome coronavirus 2
  REGION 1..12: note = Table B: HLA-DQA1*05:01-B1*02:01L
SSSSDNIALLVQ

SEQ ID NO: 23518 - protein, 15 aa, Severe acute respiratory syndrome coronavirus 2
  REGION 1..15: note = Table B: HLA-DQA1*05:01-B1*02:01L
LIIMRTFKVSIWNLD

SEQ ID NO: 23519 - protein, 16 aa, Severe acute respiratory syndrome coronavirus 2
  REGION 1..16: note = Table B: HLA-DQA1*05:01-B1*02:01L HLA-DRB3*01:01L HLA-DPA1*02:01-B1*13:01L
APLIELCVDEAGSKSP

SEQ ID NO: 23520 - protein, 11 aa, Severe acute respiratory syndrome coronavirus 2
  REGION 1..11: note = Table B: HLA-DQA1*05:01-B1*02:01L HLA-DQA1*03:01-B1*03:02L HLA-DRB1*16:01L HLA-DQA1*02:01-B1*03:03L
LPYGANKDGII

SEQ ID NO: 23521 - protein, 13 aa, Severe acute respiratory syndrome coronavirus 2
  REGION 1..13: note = Table B: HLA-DQA1*05:01-B1*02:01L HLA-DRB1*14:54L HLA-DRB1*16:01L
SPARMAGNGGDAA

SEQ ID NO: 23522 - protein, 12 aa, Severe acute respiratory syndrome coronavirus 2
  REGION 1..12: note = Table B: HLA-DQA1*05:01-B1*02:01L HLA-DRB1*12:01L HLA-DPA1*03:01-B1*105:01L HLA-DPA1*01:02-B1*04:01L HLA-DRB1*15:03L
DAALALLLLDRL

SEQ ID NO: 23523 - protein, 12 aa, Severe acute respiratory syndrome coronavirus 2
  REGION 1..12: note = Table B: HLA-DQA1*05:01-B1*02:01L
QTVTLLPAADLD

SEQ ID NO: 23524 - protein, 14 aa, Severe acute respiratory syndrome coronavirus 2
  REGION 1..14: note = Table B: HLA-DRB1*13:01L HLA-DPA1*01:03-B1*02:01L HLA-DRB1*15:01L
EIAWYTERSEKSYE

SEQ ID NO: 23525 - protein, 14 aa, Severe acute respiratory syndrome coronavirus 2
  REGION 1..14: note = Table B: HLA-DRB1*13:01L
TSAFVETVKGLDYK

SEQ ID NO: 23526 - protein, 14 aa, Severe acute respiratory syndrome coronavirus 2
  REGION 1..14: note = Table B: HLA-DRB1*13:01L
IFSRTLETAQNSVR

SEQ ID NO: 23527 - protein, 14 aa, Severe acute respiratory syndrome coronavirus 2
  REGION 1..14: note = Table B: HLA-DRB1*13:01L HLA-DRB4*01:01L HLA-DRB1*04:10L HLA-DRB1*12:02L HLA-DRB1*15:01L
EGVEFLRDGWEIVK

SEQ ID NO: 23528 - protein, 14 aa, Severe acute respiratory syndrome coronavirus 2
  REGION 1..14: note = Table B: HLA-DRB1*13:01L HLA-DPA1*01:03-B1*02:01L
NVYLAVFDKNLYDK

SEQ ID NO: 23529 - protein, 16 aa, Severe acute respiratory syndrome coronavirus 2
  REGION 1..16: note = Table B: HLA-DRB1*13:01L HLA-DRB4*01:01L HLA-DPA1*01:03-B1*04:01L HLA-DQA1*05:05-B1*03:116L
VSSFLEMKSEKQVEQK

SEQ ID NO: 23530 - protein, 15 aa, Severe acute respiratory syndrome coronavirus 2
  REGION 1..15: note = Table B: HLA-DRB1*13:01L
VTTTLEETKFLTENL

SEQ ID NO: 23531 - protein, 14 aa, Severe acute respiratory syndrome coronavirus 2
  REGION 1..14: note = Table B: HLA-DRB1*13:01L
NGYTVEEAKTVLKK

SEQ ID NO: 23532 - protein, 15 aa, Severe acute respiratory syndrome coronavirus 2
  REGION 1..15: note = Table B: HLA-DRB1*13:01L HLA-DPA1*01:03-B1*02:01L HLA-DRB1*08:02L
SVYYTSNPTTFHLDG

SEQ ID NO: 23533 - protein, 14 aa, Severe acute respiratory syndrome coronavirus 2
  REGION 1..14: note = Table B: HLA-DRB1*13:01L
ENSYTTTIKPVTYK

SEQ ID NO: 23534 - protein, 14 aa, Severe acute respiratory syndrome coronavirus 2
  REGION 1..14: note = Table B: HLA-DRB1*13:01L HLA-DRB4*01:01L HLA-DPA1*01:03-B1*02:01L
VGDIILKPANNSLK

SEQ ID NO: 23535 - protein, 13 aa, Severe acute respiratory syndrome coronavirus 2
  REGION 1..13: note = Table B: HLA-DRB1*13:01L HLA-DPA1*01:03-B1*02:01L
MAAYVDNSSLTIK

SEQ ID NO: 23536 - protein, 12 aa, Severe acute respiratory syndrome coronavirus 2
  REGION 1..12: note = Table B: HLA-DRB1*13:01L
TFISDEVARDLS

SEQ ID NO: 23537 - protein, 16 aa, Severe acute respiratory syndrome coronavirus 2
  REGION 1..16: note = Table B: HLA-DRB1*13:01L HLA-DRB1*07:01L
IHLYFDKAGQKTYERH

SEQ ID NO: 23538 - protein, 14 aa, Severe acute respiratory syndrome coronavirus 2
  REGION 1..14: note = Table B: HLA-DRB1*13:01L HLA-DRB1*07:01L
RYLALYNKYKYFSG

SEQ ID NO: 23539 - protein, 14 aa, Severe acute respiratory syndrome coronavirus 2
  REGION 1..14: note = Table B: HLA-DRB1*13:01L HLA-DRB1*08:03L
LKLKVDTANPKTPK

SEQ ID NO: 23540 - protein, 17 aa, Severe acute respiratory syndrome coronavirus 2
  REGION 1..17: note = Table B: HLA-DRB1*13:01L HLA-DRB1*15:01L
NPKTPKYKFVRIQPGQT

SEQ ID NO: 23541 - protein, 15 aa, Severe acute respiratory syndrome coronavirus 2
  REGION 1..15: note = Table B: HLA-DRB1*13:01L
VYKVYYGNALDQAIS

SEQ ID NO: 23542 - protein, 18 aa, Severe acute respiratory syndrome coronavirus 2
  REGION 1..18: note = Table B: HLA-DRB1*13:01L
SIDAFKLNIKLLGVGGKP

SEQ ID NO: 23543 - protein, 16 aa, Severe acute respiratory syndrome coronavirus 2
  REGION 1..16: note = Table B: HLA-DRB1*13:01L
SEVVLKKLKKSLNVAK

SEQ ID NO: 23544 - protein, 16 aa, Severe acute respiratory syndrome coronavirus 2
  REGION 1..16: note = Table B: HLA-DRB1*13:01L HLA-DRB4*01:01L HLA-DPA1*01:03-B1*104:01L
LNNIINNARDGCVPLN

SEQ ID NO: 23545 - protein, 16 aa, Severe acute respiratory syndrome coronavirus 2
  REGION 1..16: note = Table B: HLA-DRB1*13:01L
DDNALAYYNTTKGGRF

SEQ ID NO: 23546 - protein, 14 aa, Severe acute respiratory syndrome coronavirus 2
  REGION 1..14: note = Table B: HLA-DRB1*13:01L
ALAYYNTTKGGRFV

SEQ ID NO: 23547 - protein, 14 aa, Severe acute respiratory syndrome coronavirus 2
  REGION 1..14: note = Table B: HLA-DRB1*13:01L
GDMVPHISRQRLTK

SEQ ID NO: 23548 - protein, 15 aa, Severe acute respiratory syndrome coronavirus 2
  REGION 1..15: note = Table B: HLA-DRB1*13:01L
SVLYYQNNVFMSEAK

SEQ ID NO: 23549 - protein, 15 aa, Severe acute respiratory syndrome coronavirus 2
  REGION 1..15: note = Table B: HLA-DRB1*13:01L
FDKFKVNSTLEQYVF

SEQ ID NO: 23550 - protein, 14 aa, Severe acute respiratory syndrome coronavirus 2
  REGION 1..14: note = Table B: HLA-DRB1*13:01L HLA-DRB4*01:01L HLA-DPA1*01:03-B1*04:01L HLA-DQA1*05:05-B1*03:116L
MGFKMNYQVNGYPN

SEQ ID NO: 23551 - protein, 18 aa, Severe acute respiratory syndrome coronavirus 2
  REGION 1..18: note = Table B: HLA-DRB1*13:01L
LPETYFTQSRNLQEFKPR

SEQ ID NO: 23552 - protein, 16 aa, Severe acute respiratory syndrome coronavirus 2
  REGION 1..16: note = Table B: HLA-DRB1*13:01L
MDEFIERYKLEGYAFE

SEQ ID NO: 23553 - protein, 13 aa, Severe acute respiratory syndrome coronavirus 2
  REGION 1..13: note = Table B: HLA-DRB1*13:01L HLA-DPA1*01:03-B1*04:02L HLA-DQA1*05:05-B1*03:01L HLA-DRB1*07:01L
NDFVSDADSTLIG

SEQ ID NO: 23554 - protein, 12 aa, Severe acute respiratory syndrome coronavirus 2
  REGION 1..12: note = Table B: HLA-DRB1*13:01L HLA-DPA1*01:03-B1*02:01L HLA-DPA1*01:03-B1*104:01L HLA-DRB1*08:02L
NYIFWRNTNPIQ

SEQ ID NO: 23555 - protein, 13 aa, Severe acute respiratory syndrome coronavirus 2
  REGION 1..13: note = Table B: HLA-DRB1*13:01L HLA-DPA1*01:03-B1*04:01L HLA-DPA1*01:03-B1*02:01L HLA-DRB1*08:02L
RGVYYPDKVFRSS

SEQ ID NO: 23556 - protein, 14 aa, Severe acute respiratory syndrome coronavirus 2
  REGION 1..14: note = Table B: HLA-DRB1*13:01L HLA-DPA1*01:03-B1*104:01L HLA-DRB1*08:02L
GVYYPDKVFRSSVL

SEQ ID NO: 23557 - protein, 14 aa, Severe acute respiratory syndrome coronavirus 2
  REGION 1..14: note = Table B: HLA-DRB1*13:01L
KGIYQTSNFRVQPT

SEQ ID NO: 23558 - protein, 14 aa, Severe acute respiratory syndrome coronavirus 2
  REGION 1..14: note = Table B: HLA-DRB1*13:01L
RFASVYAWNRKRIS

SEQ ID NO: 23559 - protein, 15 aa, Severe acute respiratory syndrome coronavirus 2
  REGION 1..15: note = Table B: HLA-DRB1*13:01L HLA-DRB1*08:03L
TGVLTESNKKFLPFQ

SEQ ID NO: 23560 - protein, 16 aa, Severe acute respiratory syndrome coronavirus 2
  REGION 1..16: note = Table B: HLA-DRB1*13:01L HLA-DRB1*07:01L
ADQLTPTWRVYSTGSN

SEQ ID NO: 23561 - protein, 16 aa, Severe acute respiratory syndrome coronavirus 2
  REGION 1..16: note = Table B: HLA-DRB1*13:01L HLA-DPA1*01:03-B1*04:02L HLA-DRB3*01:01L
AENSVAYSNNSIAIPT

SEQ ID NO: 23562 - protein, 14 aa, Severe acute respiratory syndrome coronavirus 2
  REGION 1..14: note = Table B: HLA-DRB1*13:01L HLA-DRB1*07:01L
KRSFIEDLLFNKVT

SEQ ID NO: 23563 - protein, 15 aa, Severe acute respiratory syndrome coronavirus 2
  REGION 1..15: note = Table B: HLA-DRB1*13:01L
LIDLQELGKYEQYIK

SEQ ID NO: 23564 - protein, 15 aa, Severe acute respiratory syndrome coronavirus 2
  REGION 1..15: note = Table B: HLA-DRB1*13:01L
TPSDFVRATATIPIQ

SEQ ID NO: 23565 - protein, 15 aa, Severe acute respiratory syndrome coronavirus 2
  REGION 1..15: note = Table B: HLA-DRB1*13:01L
LAVFQSASKIITLKK

SEQ ID NO: 23566 - protein, 14 aa, Severe acute respiratory syndrome coronavirus 2
  REGION 1..14: note = Table B: HLA-DRB1*13:01L
KIITLKKRWQLALS

SEQ ID NO: 23567 - protein, 16 aa, Severe acute respiratory syndrome coronavirus 2
  REGION 1..16: note = Table B: HLA-DRB1*13:01L HLA-DPA1*01:03-B1*04:01L HLA-DPA1*01:03-B1*104:01L
DSGFAAYSRYRIGNYK

SEQ ID NO: 23568 - protein, 14 aa, Severe acute respiratory syndrome coronavirus 2
  REGION 1..14: note = Table B: HLA-DRB1*13:01L
DQIGYYRRATRRIR

SEQ ID NO: 23569 - protein, 19 aa, Severe acute respiratory syndrome coronavirus 2
  REGION 1..19: note = Table B: HLA-DRB1*13:01L HLA-DRB1*12:02L
DDKDPNFKDQVILLNKHID

SEQ ID NO: 23570 - protein, 18 aa, Severe acute respiratory syndrome coronavirus 2
  REGION 1..18: note = Table B: HLA-DRB4*01:01L
DSVEEVLSEARQHLKDGT

SEQ ID NO: 23571 - protein, 18 aa, Severe acute respiratory syndrome coronavirus 2
  REGION 1..18: note = Table B: HLA-DRB4*01:01L HLA-DQA1*05:05-B1*03:116L
APNMMVTNNTFTLKGGAP

SEQ ID NO: 23572 - protein, 14 aa, Severe acute respiratory syndrome coronavirus 2
  REGION 1..14: note = Table B: HLA-DRB4*01:01L
LLLYIDINGNLHPD

SEQ ID NO: 23573 - protein, 14 aa, Severe acute respiratory syndrome coronavirus 2
  REGION 1..14: note = Table B: HLA-DRB4*01:01L HLA-DPA1*02:01-B1*13:01L
LLYIDINGNLHPDS

SEQ ID NO: 23574 - protein, 15 aa, Severe acute respiratory syndrome coronavirus 2
  REGION 1..15: note = Table B: HLA-DRB4*01:01L
IVGDVVQEGVLTAVV

SEQ ID NO: 23575 - protein, 14 aa, Severe acute respiratory syndrome coronavirus 2
  REGION 1..14: note = Table B: HLA-DRB4*01:01L
ASLINTLNDLNETL

SEQ ID NO: 23576 - protein, 14 aa, Severe acute respiratory syndrome coronavirus 2
  REGION 1..14: note = Table B: HLA-DRB4*01:01L
TFYVLPNDDTLRVE

SEQ ID NO: 23577 - protein, 18 aa, Severe acute respiratory syndrome coronavirus 2
  REGION 1..18: note = Table B: HLA-DRB4*01:01L HLA-DQA1*05:05-B1*03:116L HLA-DRB1*09:01L HLA-DQA1*05:05-B1*03:01L
LDNYYKKDNSYFTEQPID

SEQ ID NO: 23578 - protein, 17 aa, Severe acute respiratory syndrome coronavirus 2
  REGION 1..17: note = Table B: HLA-DRB4*01:01L HLA-DPA1*01:03-B1*04:01L HLA-DRB1*08:02L
DNFKFVCDNIKFADDLN

SEQ ID NO: 23579 - protein, 12 aa, Severe acute respiratory syndrome coronavirus 2
  REGION 1..12: note = Table B: HLA-DRB4*01:01L HLA-DRB1*12:02L
VVENPTIQKDVL

SEQ ID NO: 23580 - protein, 18 aa, Severe acute respiratory syndrome coronavirus 2
  REGION 1..18: note = Table B: HLA-DRB4*01:01L HLA-DRB1*08:02L
VPWDTIANYAKPFLNKVV

SEQ ID NO: 23581 - protein, 15 aa, Severe acute respiratory syndrome coronavirus 2
  REGION 1..15: note = Table B: HLA-DRB4*01:01L HLA-DPA1*01:03-B1*02:01L HLA-DRB1*08:02L
IINLVQMAPISAMVR

SEQ ID NO: 23582 - protein, 16 aa, Severe acute respiratory syndrome coronavirus 2
  REGION 1..16: note = Table B: HLA-DRB4*01:01L HLA-DPA1*02:01-B1*13:01L HLA-DRB1*08:02L
LPINVIVFDGKSKCEE

SEQ ID NO: 23583 - protein, 16 aa, Severe acute respiratory syndrome coronavirus 2
  REGION 1..16: note = Table B: HLA-DRB4*01:01L HLA-DQA1*05:05-B1*03:116L
NYMLTYNKVENMTPRD

SEQ ID NO: 23584 - protein, 15 aa, Severe acute respiratory syndrome coronavirus 2
  REGION 1..15: note = Table B: HLA-DRB4*01:01L HLA-DRB1*15:01L
ASEFSSLPSYAAFAT

SEQ ID NO: 23585 - protein, 16 aa, Severe acute respiratory syndrome coronavirus 2
  REGION 1..16: note = Table B: HLA-DRB4*01:01L HLA-DPA1*01:03-B1*104:01L HLA-DRB1*08:02L
KKSLNVAKSEFDRDAA

SEQ ID NO: 23586 - protein, 16 aa, Severe acute respiratory syndrome coronavirus 2
  REGION 1..16: note = Table B: HLA-DRB4*01:01L
AKSEFDRDAAMQRKLE

SEQ ID NO: 23587 - protein, 18 aa, Severe acute respiratory syndrome coronavirus 2
  REGION 1..18: note = Table B: HLA-DRB4*01:01L
NPDILRVYANLGERVRQA

SEQ ID NO: 23588 - protein, 18 aa, Severe acute respiratory syndrome coronavirus 2
  REGION 1..18: note = Table B: HLA-DRB4*01:01L HLA-DPA1*01:03-B1*04:02L
PILTLTRALTAESHVDTD

SEQ ID NO: 23589 - protein, 16 aa, Severe acute respiratory syndrome coronavirus 2
  REGION 1..16: note = Table B: HLA-DRB4*01:01L HLA-DRB1*12:02L HLA-DRB1*14:17L HLA-DRB1*15:01L
DYDYYRYNLPTMCDIR

SEQ ID NO: 23590 - protein, 18 aa, Severe acute respiratory syndrome coronavirus 2
  REGION 1..18: note = Table B: HLA-DRB4*01:01L HLA-DRB1*09:01L
GGWHNMLKTVYSDVENPH

SEQ ID NO: 23591 - protein, 15 aa, Severe acute respiratory syndrome coronavirus 2
  REGION 1..15: note = Table B: HLA-DRB4*01:01L HLA-DPA1*01:03-B1*104:01L
LDMYSVMLTNDNTSR

SEQ ID NO: 23592 - protein, 17 aa, Severe acute respiratory syndrome coronavirus 2
  REGION 1..17: note = Table B: HLA-DRB4*01:01L HLA-DQA1*05:05-B1*03:116L
SHKLVLSVNPYVCNAPG

SEQ ID NO: 23593 - protein, 18 aa, Severe acute respiratory syndrome coronavirus 2
  REGION 1..18: note = Table B: HLA-DRB4*01:01L HLA-DQA1*05:05-B1*03:116L
ANGQVFGLYKNTCVGSDN

SEQ ID NO: 23594 - protein, 17 aa, Severe acute respiratory syndrome coronavirus 2
  REGION 1..17: note = Table B: HLA-DRB4*01:01L HLA-DQA1*05:05-B1*03:116L HLA-DPA1*01:03-B1*02:01L
TGYRVTKNSKVQIGEYT

SEQ ID NO: 23595 - protein, 17 aa, Severe acute respiratory syndrome coronavirus 2
  REGION 1..17: note = Table B: HLA-DRB4*01:01L HLA-DRB1*08:02L
DYFVLTSHTVMPLSAPT

SEQ ID NO: 23596 - protein, 14 aa, Severe acute respiratory syndrome coronavirus 2
  REGION 1..14: note = Table B: HLA-DRB4*01:01L HLA-DPA1*01:03-B1*04:02L HLA-DPA1*01:03-B1*104:01L HLA-DRB1*08:02L
AKHYVYIGDPAQLP

SEQ ID NO: 23597 - protein, 18 aa, Severe acute respiratory syndrome coronavirus 2
  REGION 1..18: note = Table B: HLA-DRB4*01:01L
ADVEWKFYDAQPCSDKAY

SEQ ID NO: 23598 - protein, 16 aa, Severe acute respiratory syndrome coronavirus 2
  REGION 1..16: note = Table B: HLA-DRB4*01:01L
LENVAFNVVNKGHFDG

SEQ ID NO: 23599 - protein, 15 aa, Severe acute respiratory syndrome coronavirus 2
  REGION 1..15: note = Table B: HLA-DRB4*01:01L HLA-DPA1*01:03-B1*02:01L HLA-DPA1*01:03-B1*104:01L
VIWDYKRDAPAHIST

SEQ ID NO: 23600 - protein, 13 aa, Severe acute respiratory syndrome coronavirus 2
  REGION 1..13: note = Table B: HLA-DRB4*01:01L
YIFWRNTNPIQLS

SEQ ID NO: 23601 - protein, 18 aa, Severe acute respiratory syndrome coronavirus 2
  REGION 1..18: note = Table B: HLA-DRB4*01:01L
SKGRLIIRENNRVVISSD

SEQ ID NO: 23602 - protein, 15 aa, Severe acute respiratory syndrome coronavirus 2
  REGION 1..15: note = Table B: HLA-DRB4*01:01L HLA-DPA1*01:03-B1*02:01L HLA-DRB1*08:03L
SEFRVYSSANNCTFE

SEQ ID NO: 23603 - protein, 14 aa, Severe acute respiratory syndrome coronavirus 2
  REGION 1..14: note = Table B: HLA-DRB4*01:01L
TSNFRVQPTESIVR

SEQ ID NO: 23604 - protein, 16 aa, Severe acute respiratory syndrome coronavirus 2
  REGION 1..16: note = Table B: HLA-DRB4*01:01L
SNFRVQPTESIVRFPN

SEQ ID NO: 23605 - protein, 13 aa, Severe acute respiratory syndrome coronavirus 2
  REGION 1..13: note = Table B: HLA-DRB4*01:01L HLA-DPA1*01:03-B1*04:02L HLA-DPA1*01:03-B1*104:01L
VADYSVLYNSASF

SEQ ID NO: 23606 - protein, 16 aa, Severe acute respiratory syndrome coronavirus 2
  REGION 1..16: note = Table B: HLA-DRB4*01:01L HLA-DPA1*01:03-B1*02:01L
VTTEILPVSMTKTSVD

SEQ ID NO: 23607 - protein, 14 aa, Severe acute respiratory syndrome coronavirus 2
  REGION 1..14: note = Table B: HLA-DRB4*01:01L
NTLVKQLSSNFGAI

SEQ ID NO: 23608 - protein, 14 aa, Severe acute respiratory syndrome coronavirus 2
  REGION 1..14: note = Table B: HLA-DRB4*01:01L HLA-DRB1*09:01L HLA-DPA1*01:03-B1*104:01L
FFIYNKIVDEPEEH

SEQ ID NO: 23609 - protein, 18 aa, Severe acute respiratory syndrome coronavirus 2
  REGION 1..18: note = Table B: HLA-DRB4*01:01L
TLSYYKLGASQRVAGDSG

SEQ ID NO: 23610 - protein, 11 aa, Severe acute respiratory syndrome coronavirus 2
  REGION 1..11: note = Table B: HLA-DRB4*01:01L
NLSKSLTENKY

SEQ ID NO: 23611 - protein, 16 aa, Severe acute respiratory syndrome coronavirus 2
  REGION 1..16: note = Table B: HLA-DRB4*01:01L
ENKYSQLDEEQPMEID

SEQ ID NO: 23612 - protein, 14 aa, Severe acute respiratory syndrome coronavirus 2
  REGION 1..14: note = Table B: HLA-DRB4*01:01L
FLEYHDVRVVLDFI

SEQ ID NO: 23613 - protein, 19 aa, Severe acute respiratory syndrome coronavirus 2
  REGION 1..19: note = Table B: HLA-DRB4*01:01L
PSGTWLTYTGAIKLDDKDP

SEQ ID NO: 23614 - protein, 11 aa, Severe acute respiratory syndrome coronavirus 2
  REGION 1..11: note = Table B: HLA-DPA1*01:03-B1*04:01L
TSWQTGDFVKA

SEQ ID NO: 23615 - protein, 16 aa, Severe acute respiratory syndrome coronavirus 2
  REGION 1..16: note = Table B: HLA-DPA1*01:03-B1*04:01L
NHTGVVGEGSEGLNDN

SEQ ID NO: 23616 - protein, 13 aa, Severe acute respiratory syndrome coronavirus 2
  REGION 1..13: note = Table B: HLA-DPA1*01:03-B1*04:01L HLA-DPA1*02:01-B1*13:01L
LVVMAYITGGVVQ

SEQ ID NO: 23617 - protein, 12 aa, Severe acute respiratory syndrome coronavirus 2
  REGION 1..12: note = Table B: HLA-DPA1*01:03-B1*04:01L HLA-DPA1*01:03-B1*04:02L HLA-DRB1*12:01L HLA-DPA1*03:01-B1*105:01L HLA-DPA1*01:02-B1*04:01L HLA-DRB1*16:01L HLA-DRB1*15:03L
GVEFLRDGWEIV

SEQ ID NO: 23618 - protein, 16 aa, Severe acute respiratory syndrome coronavirus 2
  REGION 1..16: note = Table B: HLA-DPA1*01:03-B1*04:01L HLA-DRB1*12:01L
LDEWSMATYYLFDESG

SEQ ID NO: 23619 - protein, 16 aa, Severe acute respiratory syndrome coronavirus 2
  REGION 1..16: note = Table B: HLA-DPA1*01:03-B1*04:01L HLA-DRB1*15:01L
YKGIKIQEGVVDYGAR

SEQ ID NO: 23620 - protein, 19 aa, Severe acute respiratory syndrome coronavirus 2
  REGION 1..19: note = Table B: HLA-DPA1*01:03-B1*04:01L
PDAVTAYNGYLTSSSKTPE

SEQ ID NO: 23621 - protein, 19 aa, Severe acute respiratory syndrome coronavirus 2
  REGION 1..19: note = Table B: HLA-DPA1*01:03-B1*04:01L
KPHNSHEGKTFYVLPNDDT

SEQ ID NO: 23622 - protein, 11 aa, Severe acute respiratory syndrome coronavirus 2
  REGION 1..11: note = Table B: HLA-DPA1*01:03-B1*04:01L HLA-DRB1*16:01L
RELKVTFFPDL

SEQ ID NO: 23623 - protein, 13 aa, Severe acute respiratory syndrome coronavirus 2
  REGION 1..13: note = Table B: HLA-DPA1*01:03-B1*04:01L HLA-DRB1*16:01L HLA-DRB1*04:08L
SSFKWDLTAFGLV

SEQ ID NO: 23624 - protein, 12 aa, Severe acute respiratory syndrome coronavirus 2
  REGION 1..12: note = Table B: HLA-DPA1*01:03-B1*04:01L
AEWFLAYILFTR

SEQ ID NO: 23625 - protein, 11 aa, Severe acute respiratory syndrome coronavirus 2
  REGION 1..11: note = Table B: HLA-DPA1*01:03-B1*04:01L HLA-DPA1*01:03-B1*04:02L
ILFTRFFYVLG

SEQ ID NO: 23626 - protein, 11 aa, Severe acute respiratory syndrome coronavirus 2
  REGION 1..11: note = Table B: HLA-DPA1*01:03-B1*04:01L
SYFAVHFISNS

SEQ ID NO: 23627 - protein, 14 aa, Severe acute respiratory syndrome coronavirus 2
  REGION 1..14: note = Table B: HLA-DPA1*01:03-B1*04:01L HLA-DPA1*01:03-B1*02:01L HLA-DRB1*15:01L
QSSYIVDSVTVKNG

SEQ ID NO: 23628 - protein, 13 aa, Severe acute respiratory syndrome coronavirus 2
  REGION 1..13: note = Table B: HLA-DPA1*01:03-B1*04:01L HLA-DRB3*01:01L HLA-DPA1*01:03-B1*02:01L
YLTNDVSFLAHIQ

SEQ ID NO: 23629 - protein, 13 aa, Severe acute respiratory syndrome coronavirus 2
  REGION 1..13: note = Table B: HLA-DPA1*01:03-B1*04:01L HLA-DPA1*01:03-B1*04:02L HLA-DRB3*01:01L
TFLLNKEMYLKLR

SEQ ID NO: 23630 - protein, 14 aa, Severe acute respiratory syndrome coronavirus 2
  REGION 1..14: note = Table B: HLA-DPA1*01:03-B1*04:01L
LNPNYEDLLIRKSN

SEQ ID NO: 23631 - protein, 13 aa, Severe acute respiratory syndrome coronavirus 2
  REGION 1..13: note = Table B: HLA-DPA1*01:03-B1*04:01L HLA-DPA1*01:03-B1*04:02L HLA-DPA1*01:02-B1*04:01L
GIVFMCVEYCPIF

SEQ ID NO: 23632 - protein, 11 aa, Severe acute respiratory syndrome coronavirus 2
  REGION 1..11: note = Table B: HLA-DPA1*01:03-B1*04:01L HLA-DPA1*03:01-B1*105:01L
QTMLFTMLRKL

SEQ ID NO: 23633 - protein, 11 aa, Severe acute respiratory syndrome coronavirus 2
  REGION 1..11: note = Table B: HLA-DPA1*01:03-B1*04:01L
TYASALWEIQQ

SEQ ID NO: 23634 - protein, 16 aa, Severe acute respiratory syndrome coronavirus 2
  REGION 1..16: note = Table B: HLA-DPA1*01:03-B1*04:01L HLA-DPA1*01:03-B1*04:02L HLA-DPA1*01:03-B1*104:01L HLA-DRB1*08:03L
DYFNKKDWYDFVENPD

SEQ ID NO: 23635 - protein, 17 aa, Severe acute respiratory syndrome coronavirus 2
  REGION 1..17: note = Table B: HLA-DPA1*01:03-B1*04:01L
NPDILRVYANLGERVRQ

SEQ ID NO: 23636 - protein, 15 aa, Severe acute respiratory syndrome coronavirus 2
  REGION 1..15: note = Table B: HLA-DPA1*01:03-B1*04:01L
KARLYYDSMSYEDQD

SEQ ID NO: 23637 - protein, 12 aa, Severe acute respiratory syndrome coronavirus 2
  REGION 1..12: note = Table B: HLA-DPA1*01:03-B1*04:01L HLA-DPA1*01:03-B1*04:02L HLA-DPA1*01:02-B1*04:01L HLA-DRB1*16:01L
TTAYANSVFNIC

SEQ ID NO: 23638 - protein, 11 aa, Severe acute respiratory syndrome coronavirus 2
  REGION 1..11: note = Table B: HLA-DPA1*01:03-B1*04:01L HLA-DPA1*01:03-B1*04:02L
AYANSVFNICQ

SEQ ID NO: 23639 - protein, 13 aa, Severe acute respiratory syndrome coronavirus 2
  REGION 1..13: note = Table B: HLA-DPA1*01:03-B1*04:01L
YANSVFNICQAVT

SEQ ID NO: 23640 - protein, 16 aa, Severe acute respiratory syndrome coronavirus 2
  REGION 1..16: note = Table B: HLA-DPA1*01:03-B1*04:01L HLA-DRB1*09:01L
GQVFGLYKNTCVGSDN

SEQ ID NO: 23641 - protein, 15 aa, Severe acute respiratory syndrome coronavirus 2
  REGION 1..15: note = Table B: HLA-DPA1*01:03-B1*04:01L
YKLNVGDYFVLTSHT

SEQ ID NO: 23642 - protein, 13 aa, Severe acute respiratory syndrome coronavirus 2
  REGION 1..13: note = Table B: HLA-DPA1*01:03-B1*04:01L HLA-DPA1*01:03-B1*04:02L HLA-DPA1*02:01-B1*13:01L
EKALKYLPIDKCS

SEQ ID NO: 23643 - protein, 12 aa, Severe acute respiratory syndrome coronavirus 2
  REGION 1..12: note = Table B: HLA-DPA1*01:03-B1*04:01L HLA-DPA1*01:03-B1*04:02L HLA-DQA1*01:03-B1*06:01L
STLEQYVFCTVN

SEQ ID NO: 23644 - protein, 16 aa, Severe acute respiratory syndrome coronavirus 2
  REGION 1..16: note = Table B: HLA-DPA1*01:03-B1*04:01L HLA-DPA1*01:03-B1*04:02L
ARLRAKHYVYIGDPAQ

SEQ ID NO: 23645 - protein, 12 aa, Severe acute respiratory syndrome coronavirus 2
  REGION 1..12: note = Table B: HLA-DPA1*01:03-B1*04:01L HLA-DPA1*01:03-B1*04:02L HLA-DRB1*16:01L HLA-DRB1*15:03L
GFDYVYNPFMID

SEQ ID NO: 23646 - protein, 12 aa, Severe acute respiratory syndrome coronavirus 2
  REGION 1..12: note = Table B: HLA-DPA1*01:03-B1*04:01L HLA-DPA1*01:03-B1*04:02L
FDYVYNPFMIDV

SEQ ID NO: 23647 - protein, 18 aa, Severe acute respiratory syndrome coronavirus 2
  REGION 1..18: note = Table B: HLA-DPA1*01:03-B1*04:01L HLA-DRB1*09:01L
DGGSLYVNKHAFHTPAFD

SEQ ID NO: 23648 - protein, 16 aa, Severe acute respiratory syndrome coronavirus 2
  REGION 1..16: note = Table B: HLA-DPA1*01:03-B1*04:01L HLA-DQA1*05:05-B1*03:116L
IWDYKRDAPAHISTIG

SEQ ID NO: 23649 - protein, 11 aa, Severe acute respiratory syndrome coronavirus 2
  REGION 1..11: note = Table B: HLA-DPA1*01:03-B1*04:01L
ENDSKEGFFTY

SEQ ID NO: 23650 - protein, 14 aa, Severe acute respiratory syndrome coronavirus 2
  REGION 1..14: note = Table B: HLA-DPA1*01:03-B1*04:01L
WTAFVTNVNASSSE

SEQ ID NO: 23651 - protein, 14 aa, Severe acute respiratory syndrome coronavirus 2
  REGION 1..14: note = Table B: HLA-DPA1*01:03-B1*04:01L
TAFVTNVNASSSEA

SEQ ID NO: 23652 - protein, 13 aa, Severe acute respiratory syndrome coronavirus 2
  REGION 1..13: note = Table B: HLA-DPA1*01:03-B1*04:01L HLA-DPA1*01:03-B1*04:02L
TQDLFLPFFSNVT

SEQ ID NO: 23653 - protein, 16 aa, Severe acute respiratory syndrome coronavirus 2
  REGION 1..16: note = Table B: HLA-DPA1*01:03-B1*04:01L HLA-DRB1*10:01L
NGTKRFDNPVLPFNDG

SEQ ID NO: 23654 - protein, 13 aa, Severe acute respiratory syndrome coronavirus 2
  REGION 1..13: note = Table B: HLA-DPA1*01:03-B1*04:01L HLA-DPA1*01:02-B1*04:01L HLA-DRB1*16:01L HLA-DRB1*04:08L
NVVIKVCEFQFCN

SEQ ID NO: 23655 - protein, 12 aa, Severe acute respiratory syndrome coronavirus 2
  REGION 1..12: note = Table B: HLA-DPA1*01:03-B1*04:01L HLA-DPA1*01:03-B1*104:01L
IADYNYKLPDDF

SEQ ID NO: 23656 - protein, 15 aa, Severe acute respiratory syndrome coronavirus 2
  REGION 1..15: note = Table B: HLA-DPA1*01:03-B1*04:01L HLA-DRB1*08:02L
NSVAYSNNSIAIPTN

SEQ ID NO: 23657 - protein, 16 aa, Severe acute respiratory syndrome coronavirus 2
  REGION 1..16: note = Table B: HLA-DPA1*01:03-B1*04:01L
NRALTGIAVEQDKNTQ

SEQ ID NO: 23658 - protein, 13 aa, Severe acute respiratory syndrome coronavirus 2
  REGION 1..13: note = Table B: HLA-DPA1*01:03-B1*04:01L HLA-DRB1*04:08L
SANLAATKMSECV

SEQ ID NO: 23659 - protein, 16 aa, Severe acute respiratory syndrome coronavirus 2
  REGION 1..16: note = Table B: HLA-DPA1*01:03-B1*04:01L HLA-DQA1*05:05-B1*03:116L
GKGYHLMSFPQSAPHG

SEQ ID NO: 23660 - protein, 14 aa, Severe acute respiratory syndrome coronavirus 2
  REGION 1..14: note = Table B: HLA-DPA1*01:03-B1*04:01L HLA-DRB3*01:01L
DISGINASVVNIQK

SEQ ID NO: 23661 - protein, 11 aa, Severe acute respiratory syndrome coronavirus 2
  REGION 1..11: note = Table B: HLA-DPA1*01:03-B1*04:01L HLA-DPA1*01:03-B1*04:02L HLA-DRB1*16:01L
HSYFTSDYYQL

SEQ ID NO: 23662 - protein, 16 aa, Severe acute respiratory syndrome coronavirus 2
  REGION 1..16: note = Table B: HLA-DPA1*01:03-B1*04:01L
DTGVEHVTFFIYNKIV

SEQ ID NO: 23663 - protein, 14 aa, Severe acute respiratory syndrome coronavirus 2
  REGION 1..14: note = Table B: HLA-DPA1*01:03-B1*04:01L HLA-DRB1*07:01L
GDSGFAAYSRYRIG

SEQ ID NO: 23664 - protein, 15 aa, Severe acute respiratory syndrome coronavirus 2
  REGION 1..15: note = Table B: HLA-DPA1*01:03-B1*04:01L HLA-DQA1*05:05-B1*03:116L
IGNYKLNTDHSSSSD

SEQ ID NO: 23665 - protein, 11 aa, Severe acute respiratory syndrome coronavirus 2
  REGION 1..11: note = Table B: HLA-DPA1*01:03-B1*04:01L
FHLVDFQVTIA

SEQ ID NO: 23666 - protein, 18 aa, Severe acute respiratory syndrome coronavirus 2
  REGION 1..18: note = Table B: HLA-DPA1*01:03-B1*04:01L
LPNNTASWFTALTQHGKE

SEQ ID NO: 23667 - protein, 17 aa, Severe acute respiratory syndrome coronavirus 2
  REGION 1..17: note = Table B: HLA-DPA1*01:03-B1*04:01L
GIIWVATEGALNTPKDH

SEQ ID NO: 23668 - protein, 13 aa, Severe acute respiratory syndrome coronavirus 2
  REGION 1..13: note = Table B: HLA-DPA1*01:03-B1*04:01L
GDAALALLLLDRL

SEQ ID NO: 23669 - protein, 18 aa, Severe acute respiratory syndrome coronavirus 2
  REGION 1..18: note = Table B: HLA-DPA1*01:03-B1*04:01L HLA-DPA1*01:03-B1*04:02L HLA-DPA1*01:03-B1*104:01L
ATKAYNVTQAFGRRGPEQ

SEQ ID NO: 23670 - protein, 15 aa, Severe acute respiratory syndrome coronavirus 2
  REGION 1..15: note = Table B: HLA-DPA1*01:03-B1*04:01L HLA-DPA1*01:03-B1*02:01L HLA-DPA1*01:03-B1*104:01L HLA-DQA1*05:05-B1*03:01L
GAIKLDDKDPNFKDQ

SEQ ID NO: 23671 - protein, 18 aa, Severe acute respiratory syndrome coronavirus 2
  REGION 1..18: note = Table B: HLA-DQA1*05:05-B1*03:116L
EHEHEIAWYTERSEKSYE

SEQ ID NO: 23672 - protein, 15 aa, Severe acute respiratory syndrome coronavirus 2
  REGION 1..15: note = Table B: HLA-DQA1*05:05-B1*03:116L HLA-DPA1*01:03-B1*02:01L
IAWYTERSEKSYELQ

SEQ ID NO: 23673 - protein, 14 aa, Severe acute respiratory syndrome coronavirus 2
  REGION 1..14: note = Table B: HLA-DQA1*05:05-B1*03:116L HLA-DRB1*08:02L
INIVGDFKLNEEIA

SEQ ID NO: 23674 - protein, 16 aa, Severe acute respiratory syndrome coronavirus 2
  REGION 1..16: note = Table B: HLA-DQA1*05:05-B1*03:116L
LASFSASTSAFVETVK

SEQ ID NO: 23675 - protein, 16 aa, Severe acute respiratory syndrome coronavirus 2
  REGION 1..16: note = Table B: HLA-DQA1*05:05-B1*03:116L
APKEIIFLEGETLPTE

SEQ ID NO: 23676 - protein, 19 aa, Severe acute respiratory syndrome coronavirus 2
  REGION 1..19: note = Table B: HLA-DQA1*05:05-B1*03:116L
APTKVTFGDDTVIEVQGYK

SEQ ID NO: 23677 - protein, 16 aa, Severe acute respiratory syndrome coronavirus 2
  REGION 1..16: note = Table B: HLA-DQA1*05:05-B1*03:116L
KPLEFGATSAALQPEE

SEQ ID NO: 23678 - protein, 18 aa, Severe acute respiratory syndrome coronavirus 2
  REGION 1..18: note = Table B: HLA-DQA1*05:05-B1*03:116L HLA-DRB1*08:02L
KPTVVVNAANVYLKHGGG

SEQ ID NO: 23679 - protein, 13 aa, Severe acute respiratory syndrome coronavirus 2
  REGION 1..13: note = Table B: HLA-DQA1*05:05-B1*03:116L
GGVAGALNKATNN

SEQ ID NO: 23680 - protein, 18 aa, Severe acute respiratory syndrome coronavirus 2
  REGION 1..18: note = Table B: HLA-DQA1*05:05-B1*03:116L
IQRKYKGIKIQEGVVDYG

SEQ ID NO: 23681 - protein, 18 aa, Severe acute respiratory syndrome coronavirus 2
  REGION 1..18: note = Table B: HLA-DQA1*05:05-B1*03:116L
SYFTEQPIDLVPNQPYPN

SEQ ID NO: 23682 - protein, 15 aa, Severe acute respiratory syndrome coronavirus 2
  REGION 1..15: note = Table B: HLA-DQA1*05:05-B1*03:116L
QPIDLVPNQPYPNAS

SEQ ID NO: 23683 - protein, 16 aa, Severe acute respiratory syndrome coronavirus 2
  REGION 1..16: note = Table B: HLA-DQA1*05:05-B1*03:116L
SNSFDVLKSEDAQGMD

SEQ ID NO: 23684 - protein, 14 aa, Severe acute respiratory syndrome coronavirus 2
  REGION 1..14: note = Table B: HLA-DQA1*05:05-B1*03:116L
FDVLKSEDAQGMDN

SEQ ID NO: 23685 - protein, 16 aa, Severe acute respiratory syndrome coronavirus 2
  REGION 1..16: note = Table B: HLA-DQA1*05:05-B1*03:116L
LSHFVNLDNLRANNTK

SEQ ID NO: 23686 - protein, 17 aa, Severe acute respiratory syndrome coronavirus 2
  REGION 1..17: note = Table B: HLA-DQA1*05:05-B1*03:116L
QPILLLDQALVSDVGDS

SEQ ID NO: 23687 - protein, 14 aa, Severe acute respiratory syndrome coronavirus 2
  REGION 1..14: note = Table B: HLA-DQA1*05:05-B1*03:116L
VNTFSSTFNVPMEK

SEQ ID NO: 23688 - protein, 18 aa, Severe acute respiratory syndrome coronavirus 2
  REGION 1..18: note = Table B: HLA-DQA1*05:05-B1*03:116L
ETKDVVECLKLSHQSDIE

SEQ ID NO: 23689 - protein, 17 aa, Severe acute respiratory syndrome coronavirus 2
  REGION 1..17: note = Table B: HLA-DQA1*05:05-B1*03:116L
DGSIIQFPNTYLEGSVR

SEQ ID NO: 23690 - protein, 16 aa, Severe acute respiratory syndrome coronavirus 2
  REGION 1..16: note = Table B: HLA-DQA1*05:05-B1*03:116L
NDILLAKDTTEAFEKM

SEQ ID NO: 23691 - protein, 16 aa, Severe acute respiratory syndrome coronavirus 2
  REGION 1..16: note = Table B: HLA-DQA1*05:05-B1*03:116L HLA-DPA1*01:03-B1*02:01L
IASEFSSLPSYAAFAT

SEQ ID NO: 23692 - protein, 15 aa, Severe acute respiratory syndrome coronavirus 2
  REGION 1..15: note = Table B: HLA-DQA1*05:05-B1*03:116L HLA-DPA1*01:03-B1*02:01L HLA-DPA1*01:02-B1*04:01L
LPSYAAFATAQEAYE

SEQ ID NO: 23693 - protein, 18 aa, Severe acute respiratory syndrome coronavirus 2
  REGION 1..18: note = Table B: HLA-DQA1*05:05-B1*03:116L
ADSKIVQLSEISMDNSPN

SEQ ID NO: 23694 - protein, 15 aa, Severe acute respiratory syndrome coronavirus 2
  REGION 1..15: note = Table B: HLA-DQA1*05:05-B1*03:116L
TALRANSAVKLQNNE

SEQ ID NO: 23695 - protein, 17 aa, Severe acute respiratory syndrome coronavirus 2
  REGION 1..17: note = Table B: HLA-DQA1*05:05-B1*03:116L
KGKYVQIPTTCANDPVG

SEQ ID NO: 23696 - protein, 15 aa, Severe acute respiratory syndrome coronavirus 2
  REGION 1..15: note = Table B: HLA-DQA1*05:05-B1*03:116L
EETIYNLLKDCPAVA

SEQ ID NO: 23697 - protein, 15 aa, Severe acute respiratory syndrome coronavirus 2
  REGION 1..15: note = Table B: HLA-DQA1*05:05-B1*03:116L
GDFIQTTPGSGVPVV

SEQ ID NO: 23698 - protein, 17 aa, Severe acute respiratory syndrome coronavirus 2
  REGION 1..17: note = Table B: HLA-DQA1*05:05-B1*03:116L
TGYHFRELGVVHNQDVN

SEQ ID NO: 23699 - protein, 14 aa, Severe acute respiratory syndrome coronavirus 2
  REGION 1..14: note = Table B: HLA-DQA1*05:05-B1*03:116L
AADPAMHAASGNLL

SEQ ID NO: 23700 - protein, 18 aa, Severe acute respiratory syndrome coronavirus 2
  REGION 1..18: note = Table B: HLA-DQA1*05:05-B1*03:116L
ADPAMHAASGNLLLDKRT

SEQ ID NO: 23701 - protein, 14 aa, Severe acute respiratory syndrome coronavirus 2
  REGION 1..14: note = Table B: HLA-DQA1*05:05-B1*03:116L
NNVAFQTVKPGNFN

SEQ ID NO: 23702 - protein, 16 aa, Severe acute respiratory syndrome coronavirus 2
  REGION 1..16: note = Table B: HLA-DQA1*05:05-B1*03:116L
LKHFFFAQDGNAAISD

SEQ ID NO: 23703 - protein, 16 aa, Severe acute respiratory syndrome coronavirus 2
  REGION 1..16: note = Table B: HLA-DQA1*05:05-B1*03:116L
ANQVIVNNLDKSAGFP

SEQ ID NO: 23704 - protein, 16 aa, Severe acute respiratory syndrome coronavirus 2
  REGION 1..16: note = Table B: HLA-DQA1*05:05-B1*03:116L
ANSVFNICQAVTANVN

SEQ ID NO: 23705 - protein, 16 aa, Severe acute respiratory syndrome coronavirus 2
  REGION 1..16: note = Table B: HLA-DQA1*05:05-B1*03:116L
VASIKNFKSVLYYQNN

SEQ ID NO: 23706 - protein, 11 aa, Severe acute respiratory syndrome coronavirus 2
  REGION 1..11: note = Table B: HLA-DQA1*05:05-B1*03:116L
KLHDELTGHML

SEQ ID NO: 23707 - protein, 18 aa, Severe acute respiratory syndrome coronavirus 2
  REGION 1..18: note = Table B: HLA-DQA1*05:05-B1*03:116L
TSRYWEPEFYEAMYTPHT

SEQ ID NO: 23708 - protein, 18 aa, Severe acute respiratory syndrome coronavirus 2
  REGION 1..18: note = Table B: HLA-DQA1*05:05-B1*03:116L HLA-DPA1*01:03-B1*02:01L HLA-DRB1*08:03L
YDHVISTSHKLVLSVNPY

SEQ ID NO: 23709 - protein, 15 aa, Severe acute respiratory syndrome coronavirus 2
  REGION 1..15: note = Table B: HLA-DQA1*05:05-B1*03:116L
AGDYILANTCTERLK

SEQ ID NO: 23710 - protein, 11 aa, Severe acute respiratory syndrome coronavirus 2
  REGION 1..11: note = Table B: HLA-DQA1*05:05-B1*03:116L HLA-DQA1*05:05-B1*03:01L
SAPTLVPQEHY

SEQ ID NO: 23711 - protein, 16 aa, Severe acute respiratory syndrome coronavirus 2
  REGION 1..16: note = Table B: HLA-DQA1*05:05-B1*03:116L
SALVYDNKLKAHKDKS

SEQ ID NO: 23712 - protein, 16 aa, Severe acute respiratory syndrome coronavirus 2
  REGION 1..16: note = Table B: HLA-DQA1*05:05-B1*03:116L
KGVITHDVSSAINRPQ

SEQ ID NO: 23713 - protein, 15 aa, Severe acute respiratory syndrome coronavirus 2
  REGION 1..15: note = Table B: HLA-DQA1*05:05-B1*03:116L
SPYNSQNAVASKILG

SEQ ID NO: 23714 - protein, 20 aa, Severe acute respiratory syndrome coronavirus 2
  REGION 1..20: note = Table B: HLA-DQA1*05:05-B1*03:116L
KPPPGDQFKHLIPLMYKGLP

SEQ ID NO: 23715 - protein, 16 aa, Severe acute respiratory syndrome coronavirus 2
  REGION 1..16: note = Table B: HLA-DQA1*05:05-B1*03:116L HLA-DRB1*08:02L
IPLMYKGLPWNVVRIK

SEQ ID NO: 23716 - protein, 16 aa, Severe acute respiratory syndrome coronavirus 2
  REGION 1..16: note = Table B: HLA-DQA1*05:05-B1*03:116L
DVEWKFYDAQPCSDKA

SEQ ID NO: 23717 - protein, 19 aa, Severe acute respiratory syndrome coronavirus 2
  REGION 1..19: note = Table B: HLA-DQA1*05:05-B1*03:116L
KPVPEVKILNNLGVDIAAN

SEQ ID NO: 23718 - protein, 19 aa, Severe acute respiratory syndrome coronavirus 2
  REGION 1..19: note = Table B: HLA-DQA1*05:05-B1*03:116L
PVPEVKILNNLGVDIAANT

SEQ ID NO: 23719 - protein, 14 aa, Severe acute respiratory syndrome coronavirus 2
  REGION 1..14: note = Table B: HLA-DQA1*05:05-B1*03:116L
AFVTNVNASSSEAF

SEQ ID NO: 23720 - protein, 14 aa, Severe acute respiratory syndrome coronavirus 2
  REGION 1..14: note = Table B: HLA-DQA1*05:05-B1*03:116L
SLLIVNNATNVVIK

SEQ ID NO: 23721 - protein, 17 aa, Severe acute respiratory syndrome coronavirus 2
  REGION 1..17: note = Table B: HLA-DQA1*05:05-B1*03:116L HLA-DPA1*01:03-B1*02:01L
LPQGFSALEPLVDLPIG

SEQ ID NO: 23722 - protein, 15 aa, Severe acute respiratory syndrome coronavirus 2
  REGION 1..15: note = Table B: HLA-DQA1*05:05-B1*03:116L
EKGIYQTSNFRVQPT

SEQ ID NO: 23723 - protein, 14 aa, Severe acute respiratory syndrome coronavirus 2
  REGION 1..14: note = Table B: HLA-DQA1*05:05-B1*03:116L
GIYQTSNFRVQPTE

SEQ ID NO: 23724 - protein, 17 aa, Severe acute respiratory syndrome coronavirus 2
  REGION 1..17: note = Table B: HLA-DQA1*05:05-B1*03:116L
TSNFRVQPTESIVRFPN

SEQ ID NO: 23725 - protein, 16 aa, Severe acute respiratory syndrome coronavirus 2
  REGION 1..16: note = Table B: HLA-DQA1*05:05-B1*03:116L
LKPFERDISTEIYQAG

SEQ ID NO: 23726 - protein, 18 aa, Severe acute respiratory syndrome coronavirus 2
  REGION 1..18: note = Table B: HLA-DQA1*05:05-B1*03:116L HLA-DRB1*09:01L
QVKQIYKTPPIKDFGGFN

SEQ ID NO: 23727 - protein, 20 aa, Severe acute respiratory syndrome coronavirus 2
  REGION 1..20: note = Table B: HLA-DQA1*05:05-B1*03:116L
TPPIKDFGGFNFSQILPDPS

SEQ ID NO: 23728 - protein, 17 aa, Severe acute respiratory syndrome coronavirus 2
  REGION 1..17: note = Table B: HLA-DQA1*05:05-B1*03:116L
IQDSLSSTASALGKLQD

SEQ ID NO: 23729 - protein, 14 aa, Severe acute respiratory syndrome coronavirus 2
  REGION 1..14: note = Table B: HLA-DQA1*05:05-B1*03:116L HLA-DPA1*01:02-B1*04:01L
AAEIRASANLAATK

SEQ ID NO: 23730 - protein, 15 aa, Severe acute respiratory syndrome coronavirus 2
  REGION 1..15: note = Table B: HLA-DQA1*05:05-B1*03:116L
VDLGDISGINASVVN

SEQ ID NO: 23731 - protein, 15 aa, Severe acute respiratory syndrome coronavirus 2
  REGION 1..15: note = Table B: HLA-DQA1*05:05-B1*03:116L HLA-DRB3*01:01L
DYYQLYSTQLSTDTG

SEQ ID NO: 23732 - protein, 16 aa, Severe acute respiratory syndrome coronavirus 2
  REGION 1..16: note = Table B: HLA-DQA1*05:05-B1*03:116L
LSYYKLGASQRVAGDS

SEQ ID NO: 23733 - protein, 15 aa, Severe acute respiratory syndrome coronavirus 2
  REGION 1..15: note = Table B: HLA-DQA1*05:05-B1*03:116L
GNYKLNTDHSSSSDN

SEQ ID NO: 23734 - protein, 18 aa, Severe acute respiratory syndrome coronavirus 2
  REGION 1..18: note = Table B: HLA-DQA1*05:05-B1*03:116L
TPSGTWLTYTGAIKLDDK

SEQ ID NO: 23735 - protein, 14 aa, Severe acute respiratory syndrome coronavirus 2
  REGION 1..14: note = Table B: HLA-DQA1*05:05-B1*03:116L HLA-DRB1*08:02L
TYTGAIKLDDKDPN

SEQ ID NO: 23736 - protein, 14 aa, Severe acute respiratory syndrome coronavirus 2
  REGION 1..14: note = Table B: HLA-DRB1*04:10L
LEGIQYGRSGETLG

SEQ ID NO: 23737 - protein, 13 aa, Severe acute respiratory syndrome coronavirus 2
  REGION 1..13: note = Table B: HLA-DRB1*04:10L
YEKLKPVLDWLEE

SEQ ID NO: 23738 - protein, 11 aa, Severe acute respiratory syndrome coronavirus 2
  REGION 1..11: note = Table B: HLA-DRB1*04:10L
GALNKATNNAM

SEQ ID NO: 23739 - protein, 11 aa, Severe acute respiratory syndrome coronavirus 2
  REGION 1..11: note = Table B: HLA-DRB1*04:10L
ALNKATNNAMQ

SEQ ID NO: 23740 - protein, 12 aa, Severe acute respiratory syndrome coronavirus 2
  REGION 1..12: note = Table B: HLA-DRB1*04:10L
EGVLTAVVIPTK

SEQ ID NO: 23741 - protein, 13 aa, Severe acute respiratory syndrome coronavirus 2
  REGION 1..13: note = Table B: HLA-DRB1*04:10L HLA-DRB1*04:08L
SLKITEEVGHTDL

SEQ ID NO: 23742 - protein, 12 aa, Severe acute respiratory syndrome coronavirus 2
  REGION 1..12: note = Table B: HLA-DRB1*04:10L
MPTTIAKNTVKS

SEQ ID NO: 23743 - protein, 12 aa, Severe acute respiratory syndrome coronavirus 2
  REGION 1..12: note = Table B: HLA-DRB1*04:10L HLA-DPA1*03:01-B1*105:01L
VDSVTVKNGSIH

SEQ ID NO: 23744 - protein, 13 aa, Severe acute respiratory syndrome coronavirus 2
  REGION 1..13: note = Table B: HLA-DRB1*04:10L
ELAKNVSLDNVLS

SEQ ID NO: 23745 - protein, 14 aa, Severe acute respiratory syndrome coronavirus 2
  REGION 1..14: note = Table B: HLA-DRB1*04:10L
SAARQGFVDSDVET

SEQ ID NO: 23746 - protein, 12 aa, Severe acute respiratory syndrome coronavirus 2
  REGION 1..12: note = Table B: HLA-DRB1*04:10L HLA-DRB1*04:08L
GPFVDRQTAQAA

SEQ ID NO: 23747 - protein, 14 aa, Severe acute respiratory syndrome coronavirus 2
  REGION 1..14: note = Table B: HLA-DRB1*04:10L HLA-DRB1*04:08L
YEPLTQDHVDILGP

SEQ ID NO: 23748 - protein, 12 aa, Severe acute respiratory syndrome coronavirus 2
  REGION 1..12: note = Table B: HLA-DRB1*04:10L HLA-DRB1*14:54L HLA-DRB1*04:08L
ASEFSSLPSYAA

SEQ ID NO: 23749 - protein, 12 aa, Severe acute respiratory syndrome coronavirus 2
  REGION 1..12: note = Table B: HLA-DRB1*04:10L HLA-DRB1*14:54L
LNIIPLTTAAKL

SEQ ID NO: 23750 - protein, 13 aa, Severe acute respiratory syndrome coronavirus 2
  REGION 1..13: note = Table B: HLA-DRB1*04:10L
ALWEIQQVVDADS

SEQ ID NO: 23751 - protein, 13 aa, Severe acute respiratory syndrome coronavirus 2
  REGION 1..13: note = Table B: HLA-DRB1*04:10L
ANSAVKLQNNELS

SEQ ID NO: 23752 - protein, 13 aa, Severe acute respiratory syndrome coronavirus 2
  REGION 1..13: note = Table B: HLA-DRB1*04:10L HLA-DRB1*08:03L
AESHVDTDLTKPY

SEQ ID NO: 23753 - protein, 12 aa, Severe acute respiratory syndrome coronavirus 2
  REGION 1..12: note = Table B: HLA-DRB1*04:10L
VPFVVSTGYHFR

SEQ ID NO: 23754 - protein, 11 aa, Severe acute respiratory syndrome coronavirus 2
  REGION 1..11: note = Table B: HLA-DRB1*04:10L HLA-DRB1*04:08L
VVHNQDVNLHS

SEQ ID NO: 23755 - protein, 13 aa, Severe acute respiratory syndrome coronavirus 2
  REGION 1..13: note = Table B: HLA-DRB1*04:10L
FAQDGNAAISDYD

SEQ ID NO: 23756 - protein, 13 aa, Severe acute respiratory syndrome coronavirus 2
  REGION 1..13: note = Table B: HLA-DRB1*04:10L
SIAATRGATVVIG

SEQ ID NO: 23757 - protein, 13 aa, Severe acute respiratory syndrome coronavirus 2
  REGION 1..13: note = Table B: HLA-DRB1*04:10L HLA-DRB1*14:54L HLA-DRB1*04:08L
AAETLKATEETFK

SEQ ID NO: 23758 - protein, 12 aa, Severe acute respiratory syndrome coronavirus 2
  REGION 1..12: note = Table B: HLA-DRB1*04:10L
TGYVDTPNNTDF

SEQ ID NO: 23759 - protein, 13 aa, Severe acute respiratory syndrome coronavirus 2
  REGION 1..13: note = Table B: HLA-DRB1*04:10L
GEVPVSIINNTVY

SEQ ID NO: 23760 - protein, 13 aa, Severe acute respiratory syndrome coronavirus 2
  REGION 1..13: note = Table B: HLA-DRB1*04:10L
DGVVQQLPETYFT

SEQ ID NO: 23761 - protein, 13 aa, Severe acute respiratory syndrome coronavirus 2
  REGION 1..13: note = Table B: HLA-DRB1*04:10L HLA-DRB1*12:01L HLA-DPA1*02:01-B1*13:01L HLA-DRB1*08:03L
VETFYPKLQSSQA

SEQ ID NO: 23762 - protein, 14 aa, Severe acute respiratory syndrome coronavirus 2
  REGION 1..14: note = Table B: HLA-DRB1*04:10L HLA-DRB3*01:01L
VLRQWLPTGTLLVD

SEQ ID NO: 23763 - protein, 12 aa, Severe acute respiratory syndrome coronavirus 2
  REGION 1..12: note = Table B: HLA-DRB1*04:10L
KNVTKENDSKEG

SEQ ID NO: 23764 - protein, 13 aa, Severe acute respiratory syndrome coronavirus 2
  REGION 1..13: note = Table B: HLA-DRB1*04:10L HLA-DRB1*08:02L
SVLYNSASFSTFK

SEQ ID NO: 23765 - protein, 13 aa, Severe acute respiratory syndrome coronavirus 2
  REGION 1..13: note = Table B: HLA-DRB1*04:10L HLA-DRB1*12:02L HLA-DRB1*08:03L
SNNLDSKVGGNYN

SEQ ID NO: 23766 - protein, 12 aa, Severe acute respiratory syndrome coronavirus 2
  REGION 1..12: note = Table B: HLA-DRB1*04:10L
WRVYSTGSNVFQ

SEQ ID NO: 23767 - protein, 12 aa, Severe acute respiratory syndrome coronavirus 2
  REGION 1..12: note = Table B: HLA-DRB1*04:10L
RVYSTGSNVFQT

SEQ ID NO: 23768 - protein, 13 aa, Severe acute respiratory syndrome coronavirus 2
  REGION 1..13: note = Table B: HLA-DRB1*04:10L
TTEILPVSMTKTS

SEQ ID NO: 23769 - protein, 11 aa, Severe acute respiratory syndrome coronavirus 2
  REGION 1..11: note = Table B: HLA-DRB1*04:10L HLA-DRB1*14:54L HLA-DRB1*04:08L
SAIGKIQDSLS

SEQ ID NO: 23770 - protein, 13 aa, Severe acute respiratory syndrome coronavirus 2
  REGION 1..13: note = Table B: HLA-DRB1*04:10L
FGAISSVLNDILS

SEQ ID NO: 23771 - protein, 15 aa, Severe acute respiratory syndrome coronavirus 2
  REGION 1..15: note = Table B: HLA-DRB1*04:10L HLA-DPA1*01:03-B1*04:02L HLA-DPA1*01:02-B1*04:01L
GPEQTQGNFGDQELI

SEQ ID NO: 23772 - protein, 11 aa, Severe acute respiratory syndrome coronavirus 2
  REGION 1..11: note = Table B: HLA-DRB1*04:10L
AYKTFPPTEPK

SEQ ID NO: 23773 - protein, 16 aa, Severe acute respiratory syndrome coronavirus 2
  REGION 1..16: note = Table B: HLA-DRB1*09:01L HLA-DPA1*01:03-B1*104:01L HLA-DRB1*07:01L
GHSYGADLKSFDLGDE

SEQ ID NO: 23774 - protein, 14 aa, Severe acute respiratory syndrome coronavirus 2
  REGION 1..14: note = Table B: HLA-DRB1*09:01L
MGRIRSVYPVASPN

SEQ ID NO: 23775 - protein, 15 aa, Severe acute respiratory syndrome coronavirus 2
  REGION 1..15: note = Table B: HLA-DRB1*09:01L
ADSIIIGGAKLKALN

SEQ ID NO: 23776 - protein, 14 aa, Severe acute respiratory syndrome coronavirus 2
  REGION 1..14: note = Table B: HLA-DRB1*09:01L HLA-DRB1*07:01L
EDIQLLKSAYENFN

SEQ ID NO: 23777 - protein, 12 aa, Severe acute respiratory syndrome coronavirus 2
  REGION 1..12: note = Table B: HLA-DRB1*09:01L
ITTYPGQGLNGY

SEQ ID NO: 23778 - protein, 17 aa, Severe acute respiratory syndrome coronavirus 2
  REGION 1..17: note = Table B: HLA-DRB1*09:01L HLA-DPA1*01:03-B1*04:02L
SPDAVTAYNGYLTSSSK

SEQ ID NO: 23779 - protein, 16 aa, Severe acute respiratory syndrome coronavirus 2
  REGION 1..16: note = Table B: HLA-DRB1*09:01L
GSIHLYFDKAGQKTYE

SEQ ID NO: 23780 - protein, 17 aa, Severe acute respiratory syndrome coronavirus 2
  REGION 1..17: note = Table B: HLA-DRB1*09:01L HLA-DPA1*01:03-B1*02:01L HLA-DPA1*01:03-B1*104:01L HLA-DQA1*05:05-B1*03:01L
LPINVIVFDGKSKCEES

SEQ ID NO: 23781 - protein, 17 aa, Severe acute respiratory syndrome coronavirus 2
  REGION 1..17: note = Table B: HLA-DRB1*09:01L
PINVIVFDGKSKCEESS

SEQ ID NO: 23782 - protein, 16 aa, Severe acute respiratory syndrome coronavirus 2
  REGION 1..16: note = Table B: HLA-DRB1*09:01L HLA-DRB3*01:01L
TQDHVDILGPLSAQTG

SEQ ID NO: 23783 - protein, 11 aa, Severe acute respiratory syndrome coronavirus 2
  REGION 1..11: note = Table B: HLA-DRB1*09:01L HLA-DPA1*01:03-B1*104:01L
AYYNTTKGGRF

SEQ ID NO: 23784 - protein, 17 aa, Severe acute respiratory syndrome coronavirus 2
  REGION 1..17: note = Table B: HLA-DRB1*09:01L
DLQDLKWARFPKSDGTG

SEQ ID NO: 23785 - protein, 14 aa, Severe acute respiratory syndrome coronavirus 2
  REGION 1..14: note = Table B: HLA-DRB1*09:01L
TDVVYRAFDIYNDK

SEQ ID NO: 23786 - protein, 15 aa, Severe acute respiratory syndrome coronavirus 2
  REGION 1..15: note = Table B: HLA-DRB1*09:01L
FDRYFKYWDQTYHPN

SEQ ID NO: 23787 - protein, 19 aa, Severe acute respiratory syndrome coronavirus 2
  REGION 1..19: note = Table B: HLA-DRB1*09:01L
LPAPRTLLTKGTLEPEYFN

SEQ ID NO: 23788 - protein, 15 aa, Severe acute respiratory syndrome coronavirus 2
  REGION 1..15: note = Table B: HLA-DRB1*09:01L HLA-DRB1*07:01L
LPTQTVDSSQGSEYD

SEQ ID NO: 23789 - protein, 13 aa, Severe acute respiratory syndrome coronavirus 2
  REGION 1..13: note = Table B: HLA-DRB1*09:01L HLA-DRB1*12:02L
FTRLQSLENVAFN

SEQ ID NO: 23790 - protein, 12 aa, Severe acute respiratory syndrome coronavirus 2
  REGION 1..12: note = Table B: HLA-DRB1*09:01L
ELFENKTTLPVN

SEQ ID NO: 23791 - protein, 16 aa, Severe acute respiratory syndrome coronavirus 2
  REGION 1..16: note = Table B: HLA-DRB1*09:01L
GRLIIRENNRVVISSD

SEQ ID NO: 23792 - protein, 14 aa, Severe acute respiratory syndrome coronavirus 2
  REGION 1..14: note = Table B: HLA-DRB1*09:01L HLA-DQA1*05:05-B1*03:01L HLA-DRB1*15:01L
TQNVLYENQKLIAN

SEQ ID NO: 23793 - protein, 13 aa, Severe acute respiratory syndrome coronavirus 2
  REGION 1..13: note = Table B: HLA-DRB1*09:01L HLA-DPA1*01:03-B1*104:01L HLA-DRB1*07:01L
LNTLVKQLSSNFG

SEQ ID NO: 23794 - protein, 18 aa, Severe acute respiratory syndrome coronavirus 2
  REGION 1..18: note = Table B: HLA-DPA1*01:03-B1*04:02L HLA-DPA1*01:03-B1*104:01L
VPGFNEKTHVQLSLPVLQ

SEQ ID NO: 23795 - protein, 18 aa, Severe acute respiratory syndrome coronavirus 2
  REGION 1..18: note = Table B: HLA-DPA1*01:03-B1*04:02L
EKTHVQLSLPVLQVRDVL

SEQ ID NO: 23796 - protein, 15 aa, Severe acute respiratory syndrome coronavirus 2
  REGION 1..15: note = Table B: HLA-DPA1*01:03-B1*04:02L
MGRIRSVYPVASPNE

SEQ ID NO: 23797 - protein, 18 aa, Severe acute respiratory syndrome coronavirus 2
  REGION 1..18: note = Table B: HLA-DPA1*01:03-B1*04:02L HLA-DQA1*03:01-B1*03:02L HLA-DQA1*05:05-B1*03:01L HLA-DQA1*01:03-B1*06:01L
AVVKIYCPACHNSEVGPE

SEQ ID NO: 23798 - protein, 18 aa, Severe acute respiratory syndrome coronavirus 2
  REGION 1..18: note = Table B: HLA-DPA1*01:03-B1*04:02L
GPEHSLAEYHNESGLKTI

SEQ ID NO: 23799 - protein, 12 aa, Severe acute respiratory syndrome coronavirus 2
  REGION 1..12: note = Table B: HLA-DPA1*01:03-B1*04:02L HLA-DPA1*03:01-B1*105:01L HLA-DQA1*05:05-B1*03:01L HLA-DQA1*01:03-B1*06:01L
IAFGGCVFSYVG

SEQ ID NO: 23800 - protein, 15 aa, Severe acute respiratory syndrome coronavirus 2
  REGION 1..15: note = Table B: HLA-DPA1*01:03-B1*04:02L
IAIILASFSASTSAF

SEQ ID NO: 23801 - protein, 14 aa, Severe acute respiratory syndrome coronavirus 2
  REGION 1..14: note = Table B: HLA-DPA1*01:03-B1*04:02L HLA-DPA1*01:03-B1*104:01L
ILASFSASTSAFVE

SEQ ID NO: 23802 - protein, 16 aa, Severe acute respiratory syndrome coronavirus 2
  REGION 1..16: note = Table B: HLA-DPA1*01:03-B1*04:02L
TNNLVVMAYITGGVVQ

SEQ ID NO: 23803 - protein, 12 aa, Severe acute respiratory syndrome coronavirus 2
  REGION 1..12: note = Table B: HLA-DPA1*01:03-B1*04:02L
ITGGVVQLTSQW

SEQ ID NO: 23804 - protein, 16 aa, Severe acute respiratory syndrome coronavirus 2
  REGION 1..16: note = Table B: HLA-DPA1*01:03-B1*04:02L
TGDLQPLEQPTSEAVE

SEQ ID NO: 23805 - protein, 15 aa, Severe acute respiratory syndrome coronavirus 2
  REGION 1..15: note = Table B: HLA-DPA1*01:03-B1*04:02L
KVTFGDDTVIEVQGY

SEQ ID NO: 23806 - protein, 16 aa, Severe acute respiratory syndrome coronavirus 2
  REGION 1..16: note = Table B: HLA-DPA1*01:03-B1*04:02L HLA-DPA1*01:03-B1*104:01L
YLKLTDNVYIKNADIV

SEQ ID NO: 23807 - protein, 16 aa, Severe acute respiratory syndrome coronavirus 2
  REGION 1..16: note = Table B: HLA-DPA1*01:03-B1*04:02L
GDVVQEGVLTAVVIPT

SEQ ID NO: 23808 - protein, 15 aa, Severe acute respiratory syndrome coronavirus 2
  REGION 1..15: note = Table B: HLA-DPA1*01:03-B1*04:02L
KQEILGTVSWNLREM

SEQ ID NO: 23809 - protein, 13 aa, Severe acute respiratory syndrome coronavirus 2
  REGION 1..13: note = Table B: HLA-DPA1*01:03-B1*04:02L
VITFDNLKTLLSL

SEQ ID NO: 23810 - protein, 11 aa, Severe acute respiratory syndrome coronavirus 2
  REGION 1..11: note = Table B: HLA-DPA1*01:03-B1*04:02L
YLATALLTLQQ

SEQ ID NO: 23811 - protein, 16 aa, Severe acute respiratory syndrome coronavirus 2
  REGION 1..16: note = Table B: HLA-DPA1*01:03-B1*04:02L
ALLTLQQIELKFNPPA

SEQ ID NO: 23812 - protein, 15 aa, Severe acute respiratory syndrome coronavirus 2
  REGION 1..15: note = Table B: HLA-DPA1*01:03-B1*04:02L
DVFYKENSYTTTIKP

SEQ ID NO: 23813 - protein, 17 aa, Severe acute respiratory syndrome coronavirus 2
  REGION 1..17: note = Table B: HLA-DPA1*01:03-B1*04:02L
QPYPNASFDNFKFVCDN

SEQ ID NO: 23814 - protein, 13 aa, Severe acute respiratory syndrome coronavirus 2
  REGION 1..13: note = Table B: HLA-DPA1*01:03-B1*04:02L
NLACEDLKPVSEE

SEQ ID NO: 23815 - protein, 18 aa, Severe acute respiratory syndrome coronavirus 2
  REGION 1..18: note = Table B: HLA-DPA1*01:03-B1*04:02L
ENPTIQKDVLECNVKTTE

SEQ ID NO: 23816 - protein, 20 aa, Severe acute respiratory syndrome coronavirus 2
  REGION 1..20: note = Table B: HLA-DPA1*01:03-B1*04:02L HLA-DPA1*01:03-B1*104:01L
NPTIQKDVLECNVKTTEVVG

SEQ ID NO: 23817 - protein, 16 aa, Severe acute respiratory syndrome coronavirus 2
  REGION 1..16: note = Table B: HLA-DPA1*01:03-B1*04:02L HLA-DPA1*01:03-B1*104:01L
LSRVLGLKTLATHGLA

SEQ ID NO: 23818 - protein, 15 aa, Severe acute respiratory syndrome coronavirus 2
  REGION 1..15: note = Table B: HLA-DPA1*01:03-B1*04:02L
DTIANYAKPFLNKVV

SEQ ID NO: 23819 - protein, 16 aa, Severe acute respiratory syndrome coronavirus 2
  REGION 1..16: note = Table B: HLA-DPA1*01:03-B1*04:02L
MPYFFTLLLQLCTFTR

SEQ ID NO: 23820 - protein, 13 aa, Severe acute respiratory syndrome coronavirus 2
  REGION 1..13: note = Table B: HLA-DPA1*01:03-B1*04:02L
LLLQLCTFTRSTN

SEQ ID NO: 23821 - protein, 13 aa, Severe acute respiratory syndrome coronavirus 2
  REGION 1..13: note = Table B: HLA-DPA1*01:03-B1*04:02L HLA-DRB1*04:08L
IQITISSFKWDLT

SEQ ID NO: 23822 - protein, 12 aa, Severe acute respiratory syndrome coronavirus 2
  REGION 1..12: note = Table B: HLA-DPA1*01:03-B1*04:02L
SFKWDLTAFGLV

SEQ ID NO: 23823 - protein, 12 aa, Severe acute respiratory syndrome coronavirus 2
  REGION 1..12: note = Table B: HLA-DPA1*01:03-B1*04:02L
LAYILFTRFFYV

SEQ ID NO: 23824 - protein, 12 aa, Severe acute respiratory syndrome coronavirus 2
  REGION 1..12: note = Table B: HLA-DPA1*01:03-B1*04:02L HLA-DPA1*01:02-B1*04:01L
VHFISNSWLMWL

SEQ ID NO: 23825 - protein, 17 aa, Severe acute respiratory syndrome coronavirus 2
  REGION 1..17: note = Table B: HLA-DPA1*01:03-B1*04:02L HLA-DRB1*08:02L
VARDLSLQFKRPINPTD

SEQ ID NO: 23826 - protein, 14 aa, Severe acute respiratory syndrome coronavirus 2
  REGION 1..14: note = Table B: HLA-DPA1*01:03-B1*04:02L HLA-DRB1*15:03L
SQLMCQPILLLDQA

SEQ ID NO: 23827 - protein, 18 aa, Severe acute respiratory syndrome coronavirus 2
  REGION 1..18: note = Table B: HLA-DPA1*01:03-B1*04:02L
FNVPMEKLKTLVATAEAE

SEQ ID NO: 23828 - protein, 14 aa, Severe acute respiratory syndrome coronavirus 2
  REGION 1..14: note = Table B: HLA-DPA1*01:03-B1*04:02L HLA-DRB3*01:01L HLA-DPA1*01:03-B1*104:01L HLA-DRB1*08:03L
VLSTFISAARQGFV

SEQ ID NO: 23829 - protein, 11 aa, Severe acute respiratory syndrome coronavirus 2
  REGION 1..11: note = Table B: HLA-DPA1*01:03-B1*04:02L HLA-DPA1*03:01-B1*105:01L
WNVKDFMSLSE

SEQ ID NO: 23830 - protein, 16 aa, Severe acute respiratory syndrome coronavirus 2
  REGION 1..16: note = Table B: HLA-DPA1*01:03-B1*04:02L
PNTYLEGSVRVVTTFD

SEQ ID NO: 23831 - protein, 12 aa, Severe acute respiratory syndrome coronavirus 2
  REGION 1..12: note = Table B: HLA-DPA1*01:03-B1*04:02L HLA-DPA1*03:01-B1*105:01L HLA-DQA1*03:01-B1*03:02L
IVAGGIVAIVVT

SEQ ID NO: 23832 - protein, 14 aa, Severe acute respiratory syndrome coronavirus 2
  REGION 1..14: note = Table B: HLA-DPA1*01:03-B1*04:02L
SHVVAFNTLLFLMS

SEQ ID NO: 23833 - protein, 14 aa, Severe acute respiratory syndrome coronavirus 2
  REGION 1..14: note = Table B: HLA-DPA1*01:03-B1*04:02L
VVAFNTLLFLMSFT

SEQ ID NO: 23834 - protein, 16 aa, Severe acute respiratory syndrome coronavirus 2
  REGION 1..16: note = Table B: HLA-DPA1*01:03-B1*04:02L
VPFWITIAYIICISTK

SEQ ID NO: 23835 - protein, 14 aa, Severe acute respiratory syndrome coronavirus 2
  REGION 1..14: note = Table B: HLA-DPA1*01:03-B1*04:02L
WITIAYIICISTKH

SEQ ID NO: 23836 - protein, 15 aa, Severe acute respiratory syndrome coronavirus 2
  REGION 1..15: note = Table B: HLA-DPA1*01:03-B1*04:02L HLA-DPA1*02:01-B1*13:01L
HFYWFFSNYLKRRVV

SEQ ID NO: 23837 - protein, 12 aa, Severe acute respiratory syndrome coronavirus 2
  REGION 1..12: note = Table B: HLA-DPA1*01:03-B1*04:02L HLA-DPA1*01:02-B1*04:01L
STFEEAALCTFL

SEQ ID NO: 23838 - protein, 14 aa, Severe acute respiratory syndrome coronavirus 2
  REGION 1..14: note = Table B: HLA-DPA1*01:03-B1*04:02L
TFEEAALCTFLLNK

SEQ ID NO: 23839 - protein, 12 aa, Severe acute respiratory syndrome coronavirus 2
  REGION 1..12: note = Table B: HLA-DPA1*01:03-B1*04:02L HLA-DQA1*02:01-B1*03:03L
EAALCTFLLNKE

SEQ ID NO: 23840 - protein, 16 aa, Severe acute respiratory syndrome coronavirus 2
  REGION 1..16: note = Table B: HLA-DPA1*01:03-B1*04:02L
LALYNKYKYFSGAMDT

SEQ ID NO: 23841 - protein, 17 aa, Severe acute respiratory syndrome coronavirus 2
  REGION 1..17: note = Table B: HLA-DPA1*01:03-B1*04:02L
TTSYREAACCHLAKALN

SEQ ID NO: 23842 - protein, 14 aa, Severe acute respiratory syndrome coronavirus 2
  REGION 1..14: note = Table B: HLA-DPA1*01:03-B1*04:02L
GLWLDDVVYCPRHV

SEQ ID NO: 23843 - protein, 16 aa, Severe acute respiratory syndrome coronavirus 2
  REGION 1..16: note = Table B: HLA-DPA1*01:03-B1*04:02L
VQLRVIGHSMQNCVLK

SEQ ID NO: 23844 - protein, 14 aa, Severe acute respiratory syndrome coronavirus 2
  REGION 1..14: note = Table B: HLA-DPA1*01:03-B1*04:02L HLA-DQA1*05:05-B1*03:01L
RPNFTIKGSFLNGS

SEQ ID NO: 23845 - protein, 12 aa, Severe acute respiratory syndrome coronavirus 2
  REGION 1..12: note = Table B: HLA-DPA1*01:03-B1*04:02L
NIDYDCVSFCYM

SEQ ID NO: 23846 - protein, 12 aa, Severe acute respiratory syndrome coronavirus 2
  REGION 1..12: note = Table B: HLA-DPA1*01:03-B1*04:02L HLA-DRB1*15:03L
LYENAFLPFAMG

SEQ ID NO: 23847 - protein, 16 aa, Severe acute respiratory syndrome coronavirus 2
  REGION 1..16: note = Table B: HLA-DPA1*01:03-B1*04:02L
IIAMSAFAMMFVKHKH

SEQ ID NO: 23848 - protein, 13 aa, Severe acute respiratory syndrome coronavirus 2
  REGION 1..13: note = Table B: HLA-DPA1*01:03-B1*04:02L
LPSLATVAYFNMV

SEQ ID NO: 23849 - protein, 13 aa, Severe acute respiratory syndrome coronavirus 2
  REGION 1..13: note = Table B: HLA-DPA1*01:03-B1*04:02L
MVYMPASWVMRIM

SEQ ID NO: 23850 - protein, 15 aa, Severe acute respiratory syndrome coronavirus 2
  REGION 1..15: note = Table B: HLA-DPA1*01:03-B1*04:02L
SWVMRIMTWLDMVDT

SEQ ID NO: 23851 - protein, 16 aa, Severe acute respiratory syndrome coronavirus 2
  REGION 1..16: note = Table B: HLA-DPA1*01:03-B1*04:02L
VESSSKLWAQCVQLHN

SEQ ID NO: 23852 - protein, 14 aa, Severe acute respiratory syndrome coronavirus 2
  REGION 1..14: note = Table B: HLA-DPA1*01:03-B1*04:02L
ILLAKDTTEAFEKM

SEQ ID NO: 23853 - protein, 15 aa, Severe acute respiratory syndrome coronavirus 2
  REGION 1..15: note = Table B: HLA-DPA1*01:03-B1*04:02L
DINKLCEEMLDNRAT

SEQ ID NO: 23854 - protein, 14 aa, Severe acute respiratory syndrome coronavirus 2
  REGION 1..14: note = Table B: HLA-DPA1*01:03-B1*04:02L HLA-DQA1*05:05-B1*03:01L HLA-DRB1*15:03L
LQAIASEFSSLPSY

SEQ ID NO: 23855 - protein, 14 aa, Severe acute respiratory syndrome coronavirus 2
  REGION 1..14: note = Table B: HLA-DPA1*01:03-B1*04:02L
AIASEFSSLPSYAA

SEQ ID NO: 23856 - protein, 14 aa, Severe acute respiratory syndrome coronavirus 2
  REGION 1..14: note = Table B: HLA-DPA1*01:03-B1*04:02L HLA-DPA1*01:03-B1*104:01L
SLPSYAAFATAQEA

SEQ ID NO: 23857 - protein, 14 aa, Severe acute respiratory syndrome coronavirus 2
  REGION 1..14: note = Table B: HLA-DPA1*01:03-B1*04:02L HLA-DRB3*01:01L HLA-DPA1*01:03-B1*104:01L HLA-DRB1*08:02L
QEAYEQAVANGDSE

SEQ ID NO: 23858 - protein, 14 aa, Severe acute respiratory syndrome coronavirus 2
  REGION 1..14: note = Table B: HLA-DPA1*01:03-B1*04:02L HLA-DPA1*01:03-B1*104:01L
AYEQAVANGDSEVV

SEQ ID NO: 23859 - protein, 15 aa, Severe acute respiratory syndrome coronavirus 2
  REGION 1..15: note = Table B: HLA-DPA1*01:03-B1*04:02L HLA-DRB1*08:02L
LNNIINNARDGCVPL

SEQ ID NO: 23860 - protein, 14 aa, Severe acute respiratory syndrome coronavirus 2
  REGION 1..14: note = Table B: HLA-DPA1*01:03-B1*04:02L HLA-DRB3*01:01L HLA-DPA1*01:03-B1*104:01L
ALWEIQQVVDADSK

SEQ ID NO: 23861 - protein, 14 aa, Severe acute respiratory syndrome coronavirus 2
  REGION 1..14: note = Table B: HLA-DPA1*01:03-B1*04:02L HLA-DPA1*02:01-B1*13:01L
EETIYNLLKDCPAV

SEQ ID NO: 23862 - protein, 18 aa, Severe acute respiratory syndrome coronavirus 2
  REGION 1..18: note = Table B: HLA-DPA1*01:03-B1*04:02L HLA-DPA1*01:03-B1*104:01L
IDGDMVPHISRQRLTKYT

SEQ ID NO: 23863 - protein, 13 aa, Severe acute respiratory syndrome coronavirus 2
  REGION 1..13: note = Table B: HLA-DPA1*01:03-B1*04:02L HLA-DPA1*01:02-B1*04:01L
LTKYTMADLVYAL

SEQ ID NO: 23864 - protein, 14 aa, Severe acute respiratory syndrome coronavirus 2
  REGION 1..14: note = Table B: HLA-DPA1*01:03-B1*04:02L
GNWYDFGDFIQTTP

SEQ ID NO: 23865 - protein, 14 aa, Severe acute respiratory syndrome coronavirus 2
  REGION 1..14: note = Table B: HLA-DPA1*01:03-B1*04:02L HLA-DRB1*15:03L
PYIKWDLLKYDFTE

SEQ ID NO: 23866 - protein, 13 aa, Severe acute respiratory syndrome coronavirus 2
  REGION 1..13: note = Table B: HLA-DPA1*01:03-B1*04:02L
FNVLFSTVFPPTS

SEQ ID NO: 23867 - protein, 18 aa, Severe acute respiratory syndrome coronavirus 2
  REGION 1..18: note = Table B: HLA-DPA1*01:03-B1*04:02L
ELGVVHNQDVNLHSSRLS

SEQ ID NO: 23868 - protein, 15 aa, Severe acute respiratory syndrome coronavirus 2
  REGION 1..15: note = Table B: HLA-DPA1*01:03-B1*04:02L
SSVELKHFFFAQDGN

SEQ ID NO: 23869 - protein, 16 aa, Severe acute respiratory syndrome coronavirus 2
  REGION 1..16: note = Table B: HLA-DPA1*01:03-B1*04:02L
SVELKHFFFAQDGNAA

SEQ ID NO: 23870 - protein, 15 aa, Severe acute respiratory syndrome coronavirus 2
  REGION 1..15: note = Table B: HLA-DPA1*01:03-B1*04:02L
RLYYDSMSYEDQDAL

SEQ ID NO: 23871 - protein, 17 aa, Severe acute respiratory syndrome coronavirus 2
  REGION 1..17: note = Table B: HLA-DPA1*01:03-B1*04:02L
TKRNVIPTITQMNLKYA

SEQ ID NO: 23872 - protein, 17 aa, Severe acute respiratory syndrome coronavirus 2
  REGION 1..17: note = Table B: HLA-DPA1*01:03-B1*04:02L
HQKLLKSIAATRGATVV

SEQ ID NO: 23873 - protein, 12 aa, Severe acute respiratory syndrome coronavirus 2
  REGION 1..12: note = Table B: HLA-DPA1*01:03-B1*04:02L
YANSVFNICQAV

SEQ ID NO: 23874 - protein, 12 aa, Severe acute respiratory syndrome coronavirus 2
  REGION 1..12: note = Table B: HLA-DPA1*01:03-B1*04:02L
DTDFVNEFYAYL

SEQ ID NO: 23875 - protein, 16 aa, Severe acute respiratory syndrome coronavirus 2
  REGION 1..16: note = Table B: HLA-DPA1*01:03-B1*04:02L
AYLRKHFSMMILSDDA

SEQ ID NO: 23876 - protein, 15 aa, Severe acute respiratory syndrome coronavirus 2
  REGION 1..15: note = Table B: HLA-DPA1*01:03-B1*04:02L
SMMILSDDAVVCFNS

SEQ ID NO: 23877 - protein, 14 aa, Severe acute respiratory syndrome coronavirus 2
  REGION 1..14: note = Table B: HLA-DPA1*01:03-B1*04:02L
VSLAIDAYPLTKHP

SEQ ID NO: 23878 - protein, 11 aa, Severe acute respiratory syndrome coronavirus 2
  REGION 1..11: note = Table B: HLA-DPA1*01:03-B1*04:02L
YADVFHLYLQY

SEQ ID NO: 23879 - protein, 16 aa, Severe acute respiratory syndrome coronavirus 2
  REGION 1..16: note = Table B: HLA-DPA1*01:03-B1*04:02L
HLYLQYIRKLHDELTG

SEQ ID NO: 23880 - protein, 18 aa, Severe acute respiratory syndrome coronavirus 2
  REGION 1..18: note = Table B: HLA-DPA1*01:03-B1*04:02L
TPHTVLQAVGACVLCNSQ

SEQ ID NO: 23881 - protein, 16 aa, Severe acute respiratory syndrome coronavirus 2
  REGION 1..16: note = Table B: HLA-DPA1*01:03-B1*04:02L
YDHVISTSHKLVLSVN

SEQ ID NO: 23882 - protein, 15 aa, Severe acute respiratory syndrome coronavirus 2
  REGION 1..15: note = Table B: HLA-DPA1*01:03-B1*04:02L HLA-DRB1*15:03L
DNVTDFNAIATCDWT

SEQ ID NO: 23883 - protein, 14 aa, Severe acute respiratory syndrome coronavirus 2
  REGION 1..14: note = Table B: HLA-DPA1*01:03-B1*04:02L
NAIATCDWTNAGDY

SEQ ID NO: 23884 - protein, 16 aa, Severe acute respiratory syndrome coronavirus 2
  REGION 1..16: note = Table B: HLA-DPA1*01:03-B1*04:02L
EETFKLSYGIATVREV

SEQ ID NO: 23885 - protein, 16 aa, Severe acute respiratory syndrome coronavirus 2
  REGION 1..16: note = Table B: HLA-DPA1*01:03-B1*04:02L
ETFKLSYGIATVREVL

SEQ ID NO: 23886 - protein, 14 aa, Severe acute respiratory syndrome coronavirus 2
  REGION 1..14: note = Table B: HLA-DPA1*01:03-B1*04:02L HLA-DPA1*01:03-B1*02:01L HLA-DRB1*07:01L HLA-DRB1*08:02L
ALVYDNKLKAHKDK

SEQ ID NO: 23887 - protein, 14 aa, Severe acute respiratory syndrome coronavirus 2
  REGION 1..14: note = Table B: HLA-DPA1*01:03-B1*04:02L HLA-DRB1*08:02L
SPYNSQNAVASKIL

SEQ ID NO: 23888 - protein, 17 aa, Severe acute respiratory syndrome coronavirus 2
  REGION 1..17: note = Table B: HLA-DPA1*01:03-B1*04:02L HLA-DPA1*01:03-B1*104:01L HLA-DQA1*05:05-B1*03:01L
LPWNVVRIKIVQMLSDT

SEQ ID NO: 23889 - protein, 18 aa, Severe acute respiratory syndrome coronavirus 2
  REGION 1..18: note = Table B: HLA-DPA1*01:03-B1*04:02L
IGDELKINAACRKVQHMV

SEQ ID NO: 23890 - protein, 17 aa, Severe acute respiratory syndrome coronavirus 2
  REGION 1..17: note = Table B: HLA-DPA1*01:03-B1*04:02L
VNKHAFHTPAFDKSAFV

SEQ ID NO: 23891 - protein, 15 aa, Severe acute respiratory syndrome coronavirus 2
  REGION 1..15: note = Table B: HLA-DPA1*01:03-B1*04:02L
NMMISAGFSLWVYKQ

SEQ ID NO: 23892 - protein, 14 aa, Severe acute respiratory syndrome coronavirus 2
  REGION 1..14: note = Table B: HLA-DPA1*01:03-B1*04:02L HLA-DPA1*02:01-B1*13:01L HLA-DPA1*01:03-B1*104:01L
ILNNLGVDIAANTV

SEQ ID NO: 23893 - protein, 13 aa, Severe acute respiratory syndrome coronavirus 2
  REGION 1..13: note = Table B: HLA-DPA1*01:03-B1*04:02L
AFEHIVYGDFSHS

SEQ ID NO: 23894 - protein, 13 aa, Severe acute respiratory syndrome coronavirus 2
  REGION 1..13: note = Table B: HLA-DPA1*01:03-B1*04:02L
VYGDFSHSQLGGL

SEQ ID NO: 23895 - protein, 11 aa, Severe acute respiratory syndrome coronavirus 2
  REGION 1..11: note = Table B: HLA-DPA1*01:03-B1*04:02L
FELEDFIPMDS

SEQ ID NO: 23896 - protein, 15 aa, Severe acute respiratory syndrome coronavirus 2
  REGION 1..15: note = Table B: HLA-DPA1*01:03-B1*04:02L
VSKVVKVTIDYTEIS

SEQ ID NO: 23897 - protein, 14 aa, Severe acute respiratory syndrome coronavirus 2
  REGION 1..14: note = Table B: HLA-DPA1*01:03-B1*04:02L
YLNTLTLAVPYNMR

SEQ ID NO: 23898 - protein, 16 aa, Severe acute respiratory syndrome coronavirus 2
  REGION 1..16: note = Table B: HLA-DPA1*01:03-B1*04:02L
VSDADSTLIGDCATVH

SEQ ID NO: 23899 - protein, 18 aa, Severe acute respiratory syndrome coronavirus 2
  REGION 1..18: note = Table B: HLA-DPA1*01:03-B1*04:02L
TANKWDLIISDMYDPKTK

SEQ ID NO: 23900 - protein, 14 aa, Severe acute respiratory syndrome coronavirus 2
  REGION 1..14: note = Table B: HLA-DPA1*01:03-B1*04:02L
FFTYICGFIQQKLA

SEQ ID NO: 23901 - protein, 11 aa, Severe acute respiratory syndrome coronavirus 2
  REGION 1..11: note = Table B: HLA-DPA1*01:03-B1*04:02L HLA-DRB1*12:01L HLA-DRB1*16:01L
HSWNADLYKLM

SEQ ID NO: 23902 - protein, 12 aa, Severe acute respiratory syndrome coronavirus 2
  REGION 1..12: note = Table B: HLA-DPA1*01:03-B1*04:02L
WNADLYKLMGHF

SEQ ID NO: 23903 - protein, 13 aa, Severe acute respiratory syndrome coronavirus 2
  REGION 1..13: note = Table B: HLA-DPA1*01:03-B1*04:02L HLA-DPA1*01:03-B1*104:01L HLA-DPA1*01:02-B1*04:01L
FVTNVNASSSEAF

SEQ ID NO: 23904 - protein, 15 aa, Severe acute respiratory syndrome coronavirus 2
  REGION 1..15: note = Table B: HLA-DPA1*01:03-B1*04:02L HLA-DPA1*01:03-B1*104:01L HLA-DRB1*04:08L
VTNVNASSSEAFLIG

SEQ ID NO: 23905 - protein, 15 aa, Severe acute respiratory syndrome coronavirus 2
  REGION 1..15: note = Table B: HLA-DPA1*01:03-B1*04:02L
AFLIGCNYLGKPREQ

SEQ ID NO: 23906 - protein, 15 aa, Severe acute respiratory syndrome coronavirus 2
  REGION 1..15: note = Table B: HLA-DPA1*01:03-B1*04:02L
VLHSTQDLFLPFFSN

SEQ ID NO: 23907 - protein, 13 aa, Severe acute respiratory syndrome coronavirus 2
  REGION 1..13: note = Table B: HLA-DPA1*01:03-B1*04:02L
LPFFSNVTWFHAI

SEQ ID NO: 23908 - protein, 12 aa, Severe acute respiratory syndrome coronavirus 2
  REGION 1..12: note = Table B: HLA-DPA1*01:03-B1*04:02L HLA-DRB1*15:03L
NIIRGWIFGTTL

SEQ ID NO: 23909 - protein, 12 aa, Severe acute respiratory syndrome coronavirus 2
  REGION 1..12: note = Table B: HLA-DPA1*01:03-B1*04:02L
WMESEFRVYSSA

SEQ ID NO: 23910 - protein, 16 aa, Severe acute respiratory syndrome coronavirus 2
  REGION 1..16: note = Table B: HLA-DPA1*01:03-B1*04:02L
SQPFLMDLEGKQGNFK

SEQ ID NO: 23911 - protein, 18 aa, Severe acute respiratory syndrome coronavirus 2
  REGION 1..18: note = Table B: HLA-DPA1*01:03-B1*04:02L
VFKNIDGYFKIYSKHTPI

SEQ ID NO: 23912 - protein, 16 aa, Severe acute respiratory syndrome coronavirus 2
  REGION 1..16: note = Table B: HLA-DPA1*01:03-B1*04:02L
RKRISNCVADYSVLYN

SEQ ID NO: 23913 - protein, 15 aa, Severe acute respiratory syndrome coronavirus 2
  REGION 1..15: note = Table B: HLA-DPA1*01:03-B1*04:02L HLA-DQA1*05:05-B1*03:01L HLA-DQA1*01:03-B1*06:01L HLA-DRB1*04:08L
VSPTKLNDLCFTNVY

SEQ ID NO: 23914 - protein, 14 aa, Severe acute respiratory syndrome coronavirus 2
  REGION 1..14: note = Table B: HLA-DPA1*01:03-B1*04:02L HLA-DRB1*04:08L
DDFTGCVIAWNSNN

SEQ ID NO: 23915 - protein, 16 aa, Severe acute respiratory syndrome coronavirus 2
  REGION 1..16: note = Table B: HLA-DPA1*01:03-B1*04:02L HLA-DPA1*02:01-B1*13:01L
NYNYLYRLFRKSNLKP

SEQ ID NO: 23916 - protein, 14 aa, Severe acute respiratory syndrome coronavirus 2
  REGION 1..14: note = Table B: HLA-DPA1*01:03-B1*04:02L HLA-DPA1*02:01-B1*13:01L
PFERDISTEIYQAG

SEQ ID NO: 23917 - protein, 13 aa, Severe acute respiratory syndrome coronavirus 2
  REGION 1..13: note = Table B: HLA-DPA1*01:03-B1*04:02L HLA-DQA1*01:03-B1*06:01L
YFPLQSYGFQPTN

SEQ ID NO: 23918 - protein, 14 aa, Severe acute respiratory syndrome coronavirus 2
  REGION 1..14: note = Table B: HLA-DPA1*01:03-B1*04:02L HLA-DQA1*01:03-B1*06:01L
PLQSYGFQPTNGVG

SEQ ID NO: 23919 - protein, 13 aa, Severe acute respiratory syndrome coronavirus 2
  REGION 1..13: note = Table B: HLA-DPA1*01:03-B1*04:02L HLA-DRB1*16:01L
RVVVLSFELLHAP

SEQ ID NO: 23920 - protein, 13 aa, Severe acute respiratory syndrome coronavirus 2
  REGION 1..13: note = Table B: HLA-DPA1*01:03-B1*04:02L HLA-DPA1*02:01-B1*13:01L HLA-DRB1*08:03L
FLPFQQFGRDIAD

SEQ ID NO: 23921 - protein, 13 aa, Severe acute respiratory syndrome coronavirus 2
  REGION 1..13: note = Table B: HLA-DPA1*01:03-B1*04:02L
SFGGVSVITPGTN

SEQ ID NO: 23922 - protein, 16 aa, Severe acute respiratory syndrome coronavirus 2
  REGION 1..16: note = Table B: HLA-DPA1*01:03-B1*04:02L
VFQTRAGCLIGAEHVN

SEQ ID NO: 23923 - protein, 13 aa, Severe acute respiratory syndrome coronavirus 2
  REGION 1..13: note = Table B: HLA-DPA1*01:03-B1*04:02L HLA-DRB1*04:08L
DIPIGAGICASYQ

SEQ ID NO: 23924 - protein, 16 aa, Severe acute respiratory syndrome coronavirus 2
  REGION 1..16: note = Table B: HLA-DPA1*01:03-B1*04:02L
SQSIIAYTMSLGAENS

SEQ ID NO: 23925 - protein, 13 aa, Severe acute respiratory syndrome coronavirus 2
  REGION 1..13: note = Table B: HLA-DPA1*01:03-B1*04:02L
NLLLQYGSFCTQL

SEQ ID NO: 23926 - protein, 12 aa, Severe acute respiratory syndrome coronavirus 2
  REGION 1..12: note = Table B: HLA-DPA1*01:03-B1*04:02L
QYTSALLAGTIT

SEQ ID NO: 23927 - protein, 13 aa, Severe acute respiratory syndrome coronavirus 2
  REGION 1..13: note = Table B: HLA-DPA1*01:03-B1*04:02L
TASALGKLQDVVN

SEQ ID NO: 23928 - protein, 16 aa, Severe acute respiratory syndrome coronavirus 2
  REGION 1..16: note = Table B: HLA-DPA1*01:03-B1*04:02L
LGKLQDVVNQNAQALN

SEQ ID NO: 23929 - protein, 13 aa, Severe acute respiratory syndrome coronavirus 2
  REGION 1..13: note = Table B: HLA-DPA1*01:03-B1*04:02L HLA-DPA1*01:03-B1*104:01L
DVVNQNAQALNTL

SEQ ID NO: 23930 - protein, 16 aa, Severe acute respiratory syndrome coronavirus 2
  REGION 1..16: note = Table B: HLA-DPA1*01:03-B1*04:02L HLA-DPA1*01:03-B1*104:01L
VKQLSSNFGAISSVLN

SEQ ID NO: 23931 - protein, 14 aa, Severe acute respiratory syndrome coronavirus 2
  REGION 1..14: note = Table B: HLA-DPA1*01:03-B1*04:02L
SNFGAISSVLNDIL

SEQ ID NO: 23932 - protein, 14 aa, Severe acute respiratory syndrome coronavirus 2
  REGION 1..14: note = Table B: HLA-DPA1*01:03-B1*04:02L HLA-DQA1*05:05-B1*03:01L
FVTQRNFYEPQIIT

SEQ ID NO: 23933 - protein, 15 aa, Severe acute respiratory syndrome coronavirus 2
  REGION 1..15: note = Table B: HLA-DPA1*01:03-B1*04:02L HLA-DPA1*03:01-B1*105:01L
IAIVMVTIMLCCMTS

SEQ ID NO: 23934 - protein, 14 aa, Severe acute respiratory syndrome coronavirus 2
  REGION 1..14: note = Table B: HLA-DPA1*01:03-B1*04:02L
YALVYFLQSINFVR

SEQ ID NO: 23935 - protein, 11 aa, Severe acute respiratory syndrome coronavirus 2
  REGION 1..11: note = Table B: HLA-DPA1*01:03-B1*04:02L HLA-DPA1*03:01-B1*105:01L
LYDANYFLCWH

SEQ ID NO: 23936 - protein, 15 aa, Severe acute respiratory syndrome coronavirus 2
  REGION 1..15: note = Table B: HLA-DPA1*01:03-B1*04:02L HLA-DPA1*02:01-B1*13:01L
TGVEHVTFFIYNKIV

SEQ ID NO: 23937 - protein, 18 aa, Severe acute respiratory syndrome coronavirus 2
  REGION 1..18: note = Table B: HLA-DPA1*01:03-B1*04:02L HLA-DPA1*01:03-B1*104:01L
NPVMEPIYDEPTTTTSVP

SEQ ID NO: 23938 - protein, 13 aa, Severe acute respiratory syndrome coronavirus 2
  REGION 1..13: note = Table B: HLA-DPA1*01:03-B1*04:02L
VKNLNSSRVPDLL

SEQ ID NO: 23939 - protein, 13 aa, Severe acute respiratory syndrome coronavirus 2
  REGION 1..13: note = Table B: HLA-DPA1*01:03-B1*04:02L
RINWITGGIAIAM

SEQ ID NO: 23940 - protein, 12 aa, Severe acute respiratory syndrome coronavirus 2
  REGION 1..12: note = Table B: HLA-DPA1*01:03-B1*04:02L
LMWLSYFIASFR

SEQ ID NO: 23941 - protein, 18 aa, Severe acute respiratory syndrome coronavirus 2
  REGION 1..18: note = Table B: HLA-DPA1*01:03-B1*04:02L
FRLFARTRSMWSFNPETN

SEQ ID NO: 23942 - protein, 16 aa, Severe acute respiratory syndrome coronavirus 2
  REGION 1..16: note = Table B: HLA-DPA1*01:03-B1*04:02L
RPLLESELVIGAVILR

SEQ ID NO: 23943 - protein, 14 aa, Severe acute respiratory syndrome coronavirus 2
  REGION 1..14: note = Table B: HLA-DPA1*01:03-B1*04:02L HLA-DRB1*08:02L
TLSYYKLGASQRVA

SEQ ID NO: 23944 - protein, 14 aa, Severe acute respiratory syndrome coronavirus 2
  REGION 1..14: note = Table B: HLA-DPA1*01:03-B1*04:02L HLA-DPA1*01:03-B1*104:01L HLA-DRB1*08:02L HLA-DRB1*08:03L
YYKLGASQRVAGDS

SEQ ID NO: 23945 - protein, 13 aa, Severe acute respiratory syndrome coronavirus 2
  REGION 1..13: note = Table B: HLA-DPA1*01:03-B1*04:02L HLA-DPA1*01:02-B1*04:01L
KVSIWNLDYIINL

SEQ ID NO: 23946 - protein, 15 aa, Severe acute respiratory syndrome coronavirus 2
  REGION 1..15: note = Table B: HLA-DPA1*01:03-B1*04:02L
LALITLATCELYHYQ

SEQ ID NO: 23947 - protein, 15 aa, Severe acute respiratory syndrome coronavirus 2
  REGION 1..15: note = Table B: HLA-DPA1*01:03-B1*04:02L HLA-DPA1*02:01-B1*13:01L
GTYEGNSPFHPLADN

SEQ ID NO: 23948 - protein, 16 aa, Severe acute respiratory syndrome coronavirus 2
  REGION 1..16: note = Table B: HLA-DPA1*01:03-B1*04:02L HLA-DRB3*01:01L
ARSVSPKLFIRQEEVQ

SEQ ID NO: 23949 - protein, 17 aa, Severe acute respiratory syndrome coronavirus 2
  REGION 1..17: note = Table B: HLA-DPA1*01:03-B1*04:02L
NYTVSCLPFTINCQEPK

SEQ ID NO: 23950 - protein, 15 aa, Severe acute respiratory syndrome coronavirus 2
  REGION 1..15: note = Table B: HLA-DPA1*01:03-B1*04:02L
LPFTINCQEPKLGSL

SEQ ID NO: 23951 - protein, 16 aa, Severe acute respiratory syndrome coronavirus 2
  REGION 1..16: note = Table B: HLA-DPA1*01:03-B1*04:02L HLA-DRB1*15:03L
EPKLGSLVVRCSFYED

SEQ ID NO: 23952 - protein, 14 aa, Severe acute respiratory syndrome coronavirus 2
  REGION 1..14: note = Table B: HLA-DPA1*01:03-B1*04:02L
SLVVRCSFYEDFLE

SEQ ID NO: 23953 - protein, 16 aa, Severe acute respiratory syndrome coronavirus 2
  REGION 1..16: note = Table B: HLA-DPA1*01:03-B1*04:02L
SPARMAGNGGDAALAL

SEQ ID NO: 23954 - protein, 15 aa, Severe acute respiratory syndrome coronavirus 2
  REGION 1..15: note = Table B: HLA-DPA1*01:03-B1*04:02L
PNFKDQVILLNKHID

SEQ ID NO: 23955 - protein, 16 aa, Severe acute respiratory syndrome coronavirus 2
  REGION 1..16: note = Table B: HLA-DPA1*01:03-B1*04:02L
KKQQTVTLLPAADLDD

SEQ ID NO: 23956 - protein, 17 aa, Severe acute respiratory syndrome coronavirus 2
  REGION 1..17: note = Table B: HLA-DPA1*01:03-B1*04:02L
KQQTVTLLPAADLDDFS

SEQ ID NO: 23957 - protein, 16 aa, Severe acute respiratory syndrome coronavirus 2
  REGION 1..16: note = Table B: HLA-DPA1*01:03-B1*04:02L
TVTLLPAADLDDFSKQ

SEQ ID NO: 23958 - protein, 13 aa, Severe acute respiratory syndrome coronavirus 2
  REGION 1..13: note = Table B: HLA-DPA1*01:03-B1*04:02L
AFPFTIYSLLLCR

SEQ ID NO: 23959 - protein, 13 aa, Severe acute respiratory syndrome coronavirus 2
  REGION 1..13: note = Table B: HLA-DPA1*01:03-B1*04:02L
PFTIYSLLLCRMN

SEQ ID NO: 23960 - protein, 14 aa, Severe acute respiratory syndrome coronavirus 2
  REGION 1..14: note = Table B: HLA-DRB1*12:01L HLA-DPA1*02:01-B1*13:01L HLA-DQA1*02:01-B1*03:03L HLA-DRB1*15:03L
TKRGVYCCREHEHE

SEQ ID NO: 23961 - protein, 13 aa, Severe acute respiratory syndrome coronavirus 2
  REGION 1..13: note = Table B: HLA-DRB1*12:01L
SEKSYELQTPFEI

SEQ ID NO: 23962 - protein, 13 aa, Severe acute respiratory syndrome coronavirus 2
  REGION 1..13: note = Table B: HLA-DRB1*12:01L HLA-DPA1*02:01-B1*13:01L HLA-DPA1*01:02-B1*04:01L HLA-DRB1*16:01L
IKLAKKFDTFNGE

SEQ ID NO: 23963 - protein, 16 aa, Severe acute respiratory syndrome coronavirus 2
  REGION 1..16: note = Table B: HLA-DRB1*12:01L HLA-DPA1*03:01-B1*105:01L HLA-DRB1*15:03L
ENLTKEGATTCGYLPQ

SEQ ID NO: 23964 - protein, 14 aa, Severe acute respiratory syndrome coronavirus 2
  REGION 1..14: note = Table B: HLA-DRB1*12:01L HLA-DRB1*16:01L HLA-DRB1*04:08L HLA-DRB1*15:03L
KTILRKGGRTIAFG

SEQ ID NO: 23965 - protein, 16 aa, Severe acute respiratory syndrome coronavirus 2
  REGION 1..16: note = Table B: HLA-DRB1*12:01L
SEGLNDNLLEILQKEK

SEQ ID NO: 23966 - protein, 12 aa, Severe acute respiratory syndrome coronavirus 2
  REGION 1..12: note = Table B: HLA-DRB1*12:01L
LASFSASTSAFV

SEQ ID NO: 23967 - protein, 10 aa, Severe acute respiratory syndrome coronavirus 2
  REGION 1..10: note = Table B: HLA-DRB1*12:01L HLA-DRB1*15:03L
SLRLIDAMMF

SEQ ID NO: 23968 - protein, 11 aa, Severe acute respiratory syndrome coronavirus 2
  REGION 1..11: note = Table B: HLA-DRB1*12:01L
GGVVQLTSQWL

SEQ ID NO: 23969 - protein, 12 aa, Severe acute respiratory syndrome coronavirus 2
  REGION 1..12: note = Table B: HLA-DRB1*12:01L
LMPLKAPKEIIF

SEQ ID NO: 23970 - protein, 16 aa, Severe acute respiratory syndrome coronavirus 2
  REGION 1..16: note = Table B: HLA-DRB1*12:01L
DLDEWSMATYYLFDES

SEQ ID NO: 23971 - protein, 15 aa, Severe acute respiratory syndrome coronavirus 2
  REGION 1..15: note = Table B: HLA-DRB1*12:01L HLA-DRB1*15:03L
IKNADIVEEAKKVKP

SEQ ID NO: 23972 - protein, 13 aa, Severe acute respiratory syndrome coronavirus 2
  REGION 1..13: note = Table B: HLA-DRB1*12:01L
ATNNAMQVESDDY

SEQ ID NO: 23973 - protein, 15 aa, Severe acute respiratory syndrome coronavirus 2
  REGION 1..15: note = Table B: HLA-DRB1*12:01L HLA-DRB1*15:03L
ADPIHSLRVCVDTVR

SEQ ID NO: 23974 - protein, 15 aa, Severe acute respiratory syndrome coronavirus 2
  REGION 1..15: note = Table B: HLA-DRB1*12:01L HLA-DRB1*15:03L
DPIHSLRVCVDTVRT

SEQ ID NO: 23975 - protein, 13 aa, Severe acute respiratory syndrome coronavirus 2
  REGION 1..13: note = Table B: HLA-DRB1*12:01L
AKTVLKKCKSAFY

SEQ ID NO: 23976 - protein, 12 aa, Severe acute respiratory syndrome coronavirus 2
  REGION 1..12: note = Table B: HLA-DRB1*12:01L
ARFYFYTSKTTV

SEQ ID NO: 23977 - protein, 11 aa, Severe acute respiratory syndrome coronavirus 2
  REGION 1..11: note = Table B: HLA-DRB1*12:01L HLA-DQA1*01:03-B1*06:01L
INTLNDLNETL

SEQ ID NO: 23978 - protein, 15 aa, Severe acute respiratory syndrome coronavirus 2
  REGION 1..15: note = Table B: HLA-DRB1*12:01L HLA-DRB1*04:08L
LEEAARYMRSLKVPA

SEQ ID NO: 23979 - protein, 13 aa, Severe acute respiratory syndrome coronavirus 2
  REGION 1..13: note = Table B: HLA-DRB1*12:01L
LLSLREVRTIKVF

SEQ ID NO: 23980 - protein, 11 aa, Severe acute respiratory syndrome coronavirus 2
  REGION 1..11: note = Table B: HLA-DRB1*12:01L
DTLRVEAFEYY

SEQ ID NO: 23981 - protein, 11 aa, Severe acute respiratory syndrome coronavirus 2
  REGION 1..11: note = Table B: HLA-DRB1*12:01L
PQVNGLTSIKW

SEQ ID NO: 23982 - protein, 12 aa, Severe acute respiratory syndrome coronavirus 2
  REGION 1..12: note = Table B: HLA-DRB1*12:01L
ESPFVMMSAPPA

SEQ ID NO: 23983 - protein, 15 aa, Severe acute respiratory syndrome coronavirus 2
  REGION 1..15: note = Table B: HLA-DRB1*12:01L HLA-DPA1*02:01-B1*13:01L
TYKLDGVVCTEIDPK

SEQ ID NO: 23984 - protein, 12 aa, Severe acute respiratory syndrome coronavirus 2
  REGION 1..12: note = Table B: HLA-DRB1*12:01L HLA-DRB1*12:02L HLA-DRB1*15:03L
EQPIDLVPNQPY

SEQ ID NO: 23985 - protein, 13 aa, Severe acute respiratory syndrome coronavirus 2
  REGION 1..13: note = Table B: HLA-DRB1*12:01L
FDNFKFVCDNIKF

SEQ ID NO: 23986 - protein, 12 aa, Severe acute respiratory syndrome coronavirus 2
  REGION 1..12: note = Table B: HLA-DRB1*12:01L HLA-DRB1*04:08L HLA-DQA1*02:01-B1*03:03L HLA-DRB1*15:03L
DYKHYTPSFKKG

SEQ ID NO: 23987 - protein, 12 aa, Severe acute respiratory syndrome coronavirus 2
  REGION 1..12: note = Table B: HLA-DRB1*12:01L HLA-DRB1*16:01L
IVWHVNNATNKA

SEQ ID NO: 23988 - protein, 13 aa, Severe acute respiratory syndrome coronavirus 2
  REGION 1..13: note = Table B: HLA-DRB1*12:01L HLA-DRB1*15:03L
PTTIAKNTVKSVG

SEQ ID NO: 23989 - protein, 12 aa, Severe acute respiratory syndrome coronavirus 2
  REGION 1..12: note = Table B: HLA-DRB1*12:01L HLA-DRB1*15:03L
VGKFCLEASFNY

SEQ ID NO: 23990 - protein, 11 aa, Severe acute respiratory syndrome coronavirus 2
  REGION 1..11: note = Table B: HLA-DRB1*12:01L
GYLNSTNVTIA

SEQ ID NO: 23991 - protein, 13 aa, Severe acute respiratory syndrome coronavirus 2
  REGION 1..13: note = Table B: HLA-DRB1*12:01L HLA-DPA1*01:03-B1*02:01L
AYILFTRFFYVLG

SEQ ID NO: 23992 - protein, 12 aa, Severe acute respiratory syndrome coronavirus 2
  REGION 1..12: note = Table B: HLA-DRB1*12:01L
VRMYIFFASFYY

SEQ ID NO: 23993 - protein, 12 aa, Severe acute respiratory syndrome coronavirus 2
  REGION 1..12: note = Table B: HLA-DRB1*12:01L
TTIVNGVRRSFY

SEQ ID NO: 23994 - protein, 14 aa, Severe acute respiratory syndrome coronavirus 2
  REGION 1..14: note = Table B: HLA-DRB1*12:01L HLA-DRB1*04:08L HLA-DRB1*15:03L
GKGFCKLHNWNCVN

SEQ ID NO: 23995 - protein, 16 aa, Severe acute respiratory syndrome coronavirus 2
  REGION 1..16: note = Table B: HLA-DRB1*12:01L
NTKGSLPINVIVFDGK

SEQ ID NO: 23996 - protein, 13 aa, Severe acute respiratory syndrome coronavirus 2
  REGION 1..13: note = Table B: HLA-DRB1*12:01L
DIEVTGDSCNNYM

SEQ ID NO: 23997 - protein, 13 aa, Severe acute respiratory syndrome coronavirus 2
  REGION 1..13: note = Table B: HLA-DRB1*12:01L
VNNWLKQLIKVTL

SEQ ID NO: 23998 - protein, 12 aa, Severe acute respiratory syndrome coronavirus 2
  REGION 1..12: note = Table B: HLA-DRB1*12:01L HLA-DRB1*15:03L
AVITREVGFVVP

SEQ ID NO: 23999 - protein, 12 aa, Severe acute respiratory syndrome coronavirus 2
  REGION 1..12: note = Table B: HLA-DRB1*12:01L
VGNICYTPSKLI

SEQ ID NO: 24000 - protein, 13 aa, Severe acute respiratory syndrome coronavirus 2
  REGION 1..13: note = Table B: HLA-DRB1*12:01L HLA-DRB1*15:03L
IVAIVVTCLAYYF

SEQ ID NO: 24001 - protein, 12 aa, Severe acute respiratory syndrome coronavirus 2
  REGION 1..12: note = Table B: HLA-DRB1*12:01L HLA-DPA1*03:01-B1*105:01L HLA-DRB1*15:03L
IVVTCLAYYFMR

SEQ ID NO: 24002 - protein, 13 aa, Severe acute respiratory syndrome coronavirus 2
  REGION 1..13: note = Table B: HLA-DRB1*12:01L HLA-DPA1*02:01-B1*13:01L HLA-DRB1*04:08L HLA-DRB1*15:03L
RFRRAFGEYSHVV

SEQ ID NO: 24003 - protein, 12 aa, Severe acute respiratory syndrome coronavirus 2
  REGION 1..12: note = Table B: HLA-DRB1*12:01L
PVYSFLPGVYSV

SEQ ID NO: 24004 - protein, 13 aa, Severe acute respiratory syndrome coronavirus 2
  REGION 1..13: note = Table B: HLA-DRB1*12:01L
IQWMVMFTPLVPF

SEQ ID NO: 24005 - protein, 12 aa, Severe acute respiratory syndrome coronavirus 2
  REGION 1..12: note = Table B: HLA-DRB1*12:01L HLA-DQA1*05:05-B1*03:01L
VMFTPLVPFWIT

SEQ ID NO: 24006 - protein, 11 aa, Severe acute respiratory syndrome coronavirus 2
  REGION 1..11: note = Table B: HLA-DRB1*12:01L HLA-DQA1*01:03-B1*06:01L
YWFFSNYLKRR

SEQ ID NO: 24007 - protein, 13 aa, Severe acute respiratory syndrome coronavirus 2
  REGION 1..13: note = Table B: HLA-DRB1*12:01L HLA-DRB1*15:03L
YEDLLIRKSNHNF

SEQ ID NO: 24008 - protein, 13 aa, Severe acute respiratory syndrome coronavirus 2
  REGION 1..13: note = Table B: HLA-DRB1*12:01L HLA-DRB1*04:08L
NFYGPFVDRQTAQ

SEQ ID NO: 24009 - protein, 13 aa, Severe acute respiratory syndrome coronavirus 2
  REGION 1..13: note = Table B: HLA-DRB1*12:01L
VKRTIKGTHHWLL

SEQ ID NO: 24010 - protein, 14 aa, Severe acute respiratory syndrome coronavirus 2
  REGION 1..14: note = Table B: HLA-DRB1*12:01L
ATVAYFNMVYMPAS

SEQ ID NO: 24011 - protein, 13 aa, Severe acute respiratory syndrome coronavirus 2
  REGION 1..13: note = Table B: HLA-DRB1*12:01L
YFNMVYMPASWVM

SEQ ID NO: 24012 - protein, 12 aa, Severe acute respiratory syndrome coronavirus 2
  REGION 1..12: note = Table B: HLA-DRB1*12:01L HLA-DPA1*02:01-B1*13:01L
GARRVWTLMNVL

SEQ ID NO: 24013 - protein, 12 aa, Severe acute respiratory syndrome coronavirus 2
  REGION 1..12: note = Table B: HLA-DRB1*12:01L HLA-DPA1*03:01-B1*105:01L
YCPIFFITGNTL

SEQ ID NO: 24014 - protein, 13 aa, Severe acute respiratory syndrome coronavirus 2
  REGION 1..13: note = Table B: HLA-DRB1*12:01L
LNRYFRLTLGVYD

SEQ ID NO: 24015 - protein, 10 aa, Severe acute respiratory syndrome coronavirus 2
  REGION 1..10: note = Table B: HLA-DRB1*12:01L HLA-DRB1*16:01L HLA-DQA1*02:01-B1*03:03L
EFRYMNSQGL

SEQ ID NO: 24016 - protein, 14 aa, Severe acute respiratory syndrome coronavirus 2
  REGION 1..14: note = Table B: HLA-DRB1*12:01L HLA-DPA1*02:01-B1*13:01L
GGKPCIKVATVQSK

SEQ ID NO: 24017 - protein, 12 aa, Severe acute respiratory syndrome coronavirus 2
  REGION 1..12: note = Table B: HLA-DRB1*12:01L
TSVVLLSVLQQL

SEQ ID NO: 24018 - protein, 10 aa, Severe acute respiratory syndrome coronavirus 2
  REGION 1..10: note = Table B: HLA-DRB1*12:01L HLA-DRB1*15:03L
LSVLQQLRVE

SEQ ID NO: 24019 - protein, 11 aa, Severe acute respiratory syndrome coronavirus 2
  REGION 1..11: note = Table B: HLA-DRB1*12:01L HLA-DRB1*10:01L HLA-DRB1*04:08L
DILLAKDTTEA

SEQ ID NO: 24020 - protein, 11 aa, Severe acute respiratory syndrome coronavirus 2
  REGION 1..11: note = Table B: HLA-DRB1*12:01L HLA-DRB1*15:03L
EKMVSLLSVLL

SEQ ID NO: 24021 - protein, 13 aa, Severe acute respiratory syndrome coronavirus 2
  REGION 1..13: note = Table B: HLA-DRB1*12:01L
AVDINKLCEEMLD

SEQ ID NO: 24022 - protein, 13 aa, Severe acute respiratory syndrome coronavirus 2
  REGION 1..13: note = Table B: HLA-DRB1*12:01L HLA-DQA1*05:05-B1*03:01L
PSYAAFATAQEAY

SEQ ID NO: 24023 - protein, 13 aa, Severe acute respiratory syndrome coronavirus 2
  REGION 1..13: note = Table B: HLA-DRB1*12:01L HLA-DPA1*02:01-B1*13:01L HLA-DRB1*15:03L
MQRKLEKMADQAM

SEQ ID NO: 24024 - protein, 16 aa, Severe acute respiratory syndrome coronavirus 2
  REGION 1..16: note = Table B: HLA-DRB1*12:01L HLA-DPA1*02:01-B1*13:01L
SSRLSFKELLVYAADP

SEQ ID NO: 24025 - protein, 14 aa, Severe acute respiratory syndrome coronavirus 2
  REGION 1..14: note = Table B: HLA-DRB1*12:01L
TSKFYGGWHNMLKT

SEQ ID NO: 24026 - protein, 12 aa, Severe acute respiratory syndrome coronavirus 2
  REGION 1..12: note = Table B: HLA-DRB1*12:01L HLA-DRB1*15:03L
PNMLRIMASLVL

SEQ ID NO: 24027 - protein, 12 aa, Severe acute respiratory syndrome coronavirus 2
  REGION 1..12: note = Table B: HLA-DRB1*12:01L HLA-DPA1*02:01-B1*13:01L
GNKIADKYVRNL

SEQ ID NO: 24028 - protein, 11 aa, Severe acute respiratory syndrome coronavirus 2
  REGION 1..11: note = Table B: HLA-DRB1*12:01L
DFVNEFYAYLR

SEQ ID NO: 24029 - protein, 15 aa, Severe acute respiratory syndrome coronavirus 2
  REGION 1..15: note = Table B: HLA-DRB1*12:01L
YAYLRKHFSMMILSD

SEQ ID NO: 24030 - protein, 11 aa, Severe acute respiratory syndrome coronavirus 2
  REGION 1..11: note = Table B: HLA-DRB1*12:01L
YLPYPDPSRIL

SEQ ID NO: 24031 - protein, 18 aa, Severe acute respiratory syndrome coronavirus 2
  REGION 1..18: note = Table B: HLA-DRB1*12:01L HLA-DPA1*01:03-B1*104:01L
LPYPDPSRILGAGCFVDD

SEQ ID NO: 24032 - protein, 12 aa, Severe acute respiratory syndrome coronavirus 2
  REGION 1..12: note = Table B: HLA-DRB1*12:01L HLA-DRB1*16:01L HLA-DRB1*15:03L
TERLKLFAAETL

SEQ ID NO: 24033 - protein, 11 aa, Severe acute respiratory syndrome coronavirus 2
  REGION 1..11: note = Table B: HLA-DRB1*12:01L
RLKLFAAETLK

SEQ ID NO: 24034 - protein, 15 aa, Severe acute respiratory syndrome coronavirus 2
  REGION 1..15: note = Table B: HLA-DRB1*12:01L HLA-DRB1*04:08L
SDRELHLSWEVGKPR

SEQ ID NO: 24035 - protein, 10 aa, Severe acute respiratory syndrome coronavirus 2
  REGION 1..10: note = Table B: HLA-DRB1*12:01L HLA-DRB1*16:01L HLA-DQA1*01:03-B1*06:01L HLA-DQA1*02:01-B1*03:03L HLA-DRB1*15:03L
VYRGTTTYKL

SEQ ID NO: 24036 - protein, 11 aa, Severe acute respiratory syndrome coronavirus 2
  REGION 1..11: note = Table B: HLA-DRB1*12:01L HLA-DRB1*15:03L
FVLTSHTVMPL

SEQ ID NO: 24037 - protein, 14 aa, Severe acute respiratory syndrome coronavirus 2
  REGION 1..14: note = Table B: HLA-DRB1*12:01L HLA-DRB1*04:08L
YVRITGLYPTLNIS

SEQ ID NO: 24038 - protein, 14 aa, Severe acute respiratory syndrome coronavirus 2
  REGION 1..14: note = Table B: HLA-DRB1*12:01L
PQIGVVREFLTRNP

SEQ ID NO: 24039 - protein, 12 aa, Severe acute respiratory syndrome coronavirus 2
  REGION 1..12: note = Table B: HLA-DRB1*12:01L HLA-DRB1*15:03L
YRRLISMMGFKM

SEQ ID NO: 24040 - protein, 12 aa, Severe acute respiratory syndrome coronavirus 2
  REGION 1..12: note = Table B: HLA-DRB1*12:01L HLA-DPA1*03:01-B1*105:01L
DRVVFVLWAHGF

SEQ ID NO: 24041 - protein, 15 aa, Severe acute respiratory syndrome coronavirus 2
  REGION 1..15: note = Table B: HLA-DRB1*12:01L
FELTSMKYFVKIGPE

SEQ ID NO: 24042 - protein, 13 aa, Severe acute respiratory syndrome coronavirus 2
  REGION 1..13: note = Table B: HLA-DRB1*12:01L HLA-DRB1*14:54L HLA-DRB1*04:08L
DVQQWGFTGNLQS

SEQ ID NO: 24043 - protein, 11 aa, Severe acute respiratory syndrome coronavirus 2
  REGION 1..11: note = Table B: HLA-DRB1*12:01L
HVASCDAIMTR

SEQ ID NO: 24044 - protein, 12 aa, Severe acute respiratory syndrome coronavirus 2
  REGION 1..12: note = Table B: HLA-DRB1*12:01L HLA-DPA1*01:02-B1*04:01L
KAYKIEELFYSY

SEQ ID NO: 24045 - protein, 11 aa, Severe acute respiratory syndrome coronavirus 2
  REGION 1..11: note = Table B: HLA-DRB1*12:01L HLA-DPA1*03:01-B1*105:01L HLA-DQA1*02:01-B1*03:03L
DAYNMMISAGF

SEQ ID NO: 24046 - protein, 13 aa, Severe acute respiratory syndrome coronavirus 2
  REGION 1..13: note = Table B: HLA-DRB1*12:01L HLA-DQA1*01:03-B1*06:01L
APAHISTIGVCSM

SEQ ID NO: 24047 - protein, 13 aa, Severe acute respiratory syndrome coronavirus 2
  REGION 1..13: note = Table B: HLA-DRB1*12:01L HLA-DRB1*15:03L
DLFRNARNGVLIT

SEQ ID NO: 24048 - protein, 12 aa, Severe acute respiratory syndrome coronavirus 2
  REGION 1..12: note = Table B: HLA-DRB1*12:01L HLA-DRB1*14:54L
SVVSKVVKVTID

SEQ ID NO: 24049 - protein, 12 aa, Severe acute respiratory syndrome coronavirus 2
  REGION 1..12: note = Table B: HLA-DRB1*12:01L
VVSKVVKVTIDY

SEQ ID NO: 24050 - protein, 13 aa, Severe acute respiratory syndrome coronavirus 2
  REGION 1..13: note = Table B: HLA-DRB1*12:01L HLA-DRB1*04:08L
LAVPYNMRVIHFG

SEQ ID NO: 24051 - protein, 14 aa, Severe acute respiratory syndrome coronavirus 2
  REGION 1..14: note = Table B: HLA-DRB1*12:01L HLA-DRB3*01:01L
ISDMYDPKTKNVTK

SEQ ID NO: 24052 - protein, 13 aa, Severe acute respiratory syndrome coronavirus 2
  REGION 1..13: note = Table B: HLA-DRB1*12:01L
SSYSLFDMSKFPL

SEQ ID NO: 24053 - protein, 13 aa, Severe acute respiratory syndrome coronavirus 2
  REGION 1..13: note = Table B: HLA-DRB1*12:01L
FPLKLRGTAVMSL

SEQ ID NO: 24054 - protein, 14 aa, Severe acute respiratory syndrome coronavirus 2
  REGION 1..14: note = Table B: HLA-DRB1*12:01L HLA-DRB1*04:08L
GQINDMILSLLSKG

SEQ ID NO: 24055 - protein, 11 aa, Severe acute respiratory syndrome coronavirus 2
  REGION 1..11: note = Table B: HLA-DRB1*12:01L
ILSLLSKGRLI

SEQ ID NO: 24056 - protein, 13 aa, Severe acute respiratory syndrome coronavirus 2
  REGION 1..13: note = Table B: HLA-DRB1*12:01L HLA-DPA1*02:01-B1*13:01L
EFQFCNDPFLGVY

SEQ ID NO: 24057 - protein, 12 aa, Severe acute respiratory syndrome coronavirus 2
  REGION 1..12: note = Table B: HLA-DRB1*12:01L HLA-DRB1*04:08L
NKSWMESEFRVY

SEQ ID NO: 24058 - protein, 11 aa, Severe acute respiratory syndrome coronavirus 2
  REGION 1..11: note = Table B: HLA-DRB1*12:01L HLA-DRB1*15:03L
GNFKNLREFVF

SEQ ID NO: 24059 - protein, 10 aa, Severe acute respiratory syndrome coronavirus 2
  REGION 1..10: note = Table B: HLA-DRB1*12:01L HLA-DRB1*15:03L
FKNLREFVFK

SEQ ID NO: 24060 - protein, 10 aa, Severe acute respiratory syndrome coronavirus 2
  REGION 1..10: note = Table B: HLA-DRB1*12:01L HLA-DQA1*03:01-B1*03:02L HLA-DPA1*01:02-B1*04:01L HLA-DRB1*16:01L
RFQTLLALHR

SEQ ID NO: 24061 - protein, 13 aa, Severe acute respiratory syndrome coronavirus 2
  REGION 1..13: note = Table B: HLA-DRB1*12:01L HLA-DRB1*16:01L
VEKGIYQTSNFRV

SEQ ID NO: 24062 - protein, 10 aa, Severe acute respiratory syndrome coronavirus 2
  REGION 1..10: note = Table B: HLA-DRB1*12:01L HLA-DQA1*03:01-B1*03:02L
RFASVYAWNR

SEQ ID NO: 24063 - protein, 14 aa, Severe acute respiratory syndrome coronavirus 2
  REGION 1..14: note = Table B: HLA-DRB1*12:01L HLA-DRB3*01:01L HLA-DPA1*02:01-B1*13:01L HLA-DPA1*01:02-B1*04:01L
RKSNLKPFERDIST

SEQ ID NO: 24064 - protein, 13 aa, Severe acute respiratory syndrome coronavirus 2
  REGION 1..13: note = Table B: HLA-DRB1*12:01L
FNCYFPLQSYGFQ

SEQ ID NO: 24065 - protein, 13 aa, Severe acute respiratory syndrome coronavirus 2
  REGION 1..13: note = Table B: HLA-DRB1*12:01L
TLEILDITPCSFG

SEQ ID NO: 24066 - protein, 12 aa, Severe acute respiratory syndrome coronavirus 2
  REGION 1..12: note = Table B: HLA-DRB1*12:01L
GAALQIPFAMQM

SEQ ID NO: 24067 - protein, 12 aa, Severe acute respiratory syndrome coronavirus 2
  REGION 1..12: note = Table B: HLA-DRB1*12:01L HLA-DRB1*15:03L
LITGRLQSLQTY

SEQ ID NO: 24068 - protein, 13 aa, Severe acute respiratory syndrome coronavirus 2
  REGION 1..13: note = Table B: HLA-DRB1*12:01L HLA-DRB1*15:03L
ELGKYEQYIKWPW

SEQ ID NO: 24069 - protein, 13 aa, Severe acute respiratory syndrome coronavirus 2
  REGION 1..13: note = Table B: HLA-DRB1*12:01L HLA-DRB1*15:03L
IAGLIAIVMVTIM

SEQ ID NO: 24070 - protein, 10 aa, Severe acute respiratory syndrome coronavirus 2
  REGION 1..10: note = Table B: HLA-DRB1*12:01L HLA-DPA1*03:01-B1*105:01L HLA-DRB1*15:03L
FVTVYSHLLL

SEQ ID NO: 24071 - protein, 12 aa, Severe acute respiratory syndrome coronavirus 2
  REGION 1..12: note = Table B: HLA-DRB1*12:01L
LVAAGLEAPFLY

SEQ ID NO: 24072 - protein, 10 aa, Severe acute respiratory syndrome coronavirus 2
  REGION 1..10: note = Table B: HLA-DRB1*12:01L HLA-DQA1*03:01-B1*03:02L HLA-DPA1*01:02-B1*04:01L HLA-DQA1*02:01-B1*03:03L
YFLQSINFVR

SEQ ID NO: 24073 - protein, 12 aa, Severe acute respiratory syndrome coronavirus 2
  REGION 1..12: note = Table B: HLA-DRB1*12:01L
IPYNSVTSSIVI

SEQ ID NO: 24074 - protein, 12 aa, Severe acute respiratory syndrome coronavirus 2
  REGION 1..12: note = Table B: HLA-DRB1*12:01L
LHSYFTSDYYQL

SEQ ID NO: 24075 - protein, 14 aa, Severe acute respiratory syndrome coronavirus 2
  REGION 1..14: note = Table B: HLA-DRB1*12:01L HLA-DRB1*15:03L
ARTRSMWSFNPETN

SEQ ID NO: 24076 - protein, 14 aa, Severe acute respiratory syndrome coronavirus 2
  REGION 1..14: note = Table B: HLA-DRB1*12:01L HLA-DRB1*15:03L
VIGAVILRGHLRIA

SEQ ID NO: 24077 - protein, 12 aa, Severe acute respiratory syndrome coronavirus 2
  REGION 1..12: note = Table B: HLA-DRB1*12:01L
MRTFKVSIWNLD

SEQ ID NO: 24078 - protein, 11 aa, Severe acute respiratory syndrome coronavirus 2
  REGION 1..11: note = Table B: HLA-DRB1*12:01L
NLIIKNLSKSL

SEQ ID NO: 24079 - protein, 12 aa, Severe acute respiratory syndrome coronavirus 2
  REGION 1..12: note = Table B: HLA-DRB1*12:01L
SKSLTENKYSQL

SEQ ID NO: 24080 - protein, 11 aa, Severe acute respiratory syndrome coronavirus 2
  REGION 1..11: note = Table B: HLA-DRB1*12:01L HLA-DPA1*03:01-B1*105:01L HLA-DQA1*01:03-B1*06:01L HLA-DRB1*15:03L
ITLATCELYHY

SEQ ID NO: 24081 - protein, 12 aa, Severe acute respiratory syndrome coronavirus 2
  REGION 1..12: note = Table B: HLA-DRB1*12:01L HLA-DRB1*15:03L
SPIFLIVAAIVF

SEQ ID NO: 24082 - protein, 12 aa, Severe acute respiratory syndrome coronavirus 2
  REGION 1..12: note = Table B: HLA-DRB1*12:01L HLA-DPA1*02:01-B1*13:01L
VGARKSAPLIEL

SEQ ID NO: 24083 - protein, 11 aa, Severe acute respiratory syndrome coronavirus 2
  REGION 1..11: note = Table B: HLA-DRB1*12:01L
DFLEYHDVRVV

SEQ ID NO: 24084 - protein, 10 aa, Severe acute respiratory syndrome coronavirus 2
  REGION 1..10: note = Table B: HLA-DRB1*12:01L
MSDNGPQNQR

SEQ ID NO: 24085 - protein, 14 aa, Severe acute respiratory syndrome coronavirus 2
  REGION 1..14: note = Table B: HLA-DRB1*12:01L
GTGPEAGLPYGANK

SEQ ID NO: 24086 - protein, 13 aa, Severe acute respiratory syndrome coronavirus 2
  REGION 1..13: note = Table B: HLA-DRB1*12:01L
AGLPYGANKDGII

SEQ ID NO: 24087 - protein, 14 aa, Severe acute respiratory syndrome coronavirus 2
  REGION 1..14: note = Table B: HLA-DRB1*12:01L
ASSRSSSRSRNSSR

SEQ ID NO: 24088 - protein, 12 aa, Severe acute respiratory syndrome coronavirus 2
  REGION 1..12: note = Table B: HLA-DRB1*12:01L HLA-DPA1*02:01-B1*13:01L
QKRTATKAYNVT

SEQ ID NO: 24089 - protein, 18 aa, Severe acute respiratory syndrome coronavirus 2
  REGION 1..18: note = Table B: HLA-DRB1*12:01L HLA-DPA1*01:03-B1*104:01L HLA-DRB1*15:03L
LPQRQKKQQTVTLLPAAD

SEQ ID NO: 24090 - protein, 12 aa, Severe acute respiratory syndrome coronavirus 2
  REGION 1..12: note = Table B: HLA-DRB1*12:02L HLA-DRB3*01:01L HLA-DRB1*14:54L
NGNLHPDSATLV

SEQ ID NO: 24091 - protein, 18 aa, Severe acute respiratory syndrome coronavirus 2
  REGION 1..18: note = Table B: HLA-DRB1*12:02L HLA-DRB1*07:01L HLA-DRB1*15:01L
LPINVIVFDGKSKCEESS

SEQ ID NO: 24092 - protein, 13 aa, Severe acute respiratory syndrome coronavirus 2
  REGION 1..13: note = Table B: HLA-DRB1*12:02L HLA-DRB3*01:01L
MLTYNKVENMTPR

SEQ ID NO: 24093 - protein, 12 aa, Severe acute respiratory syndrome coronavirus 2
  REGION 1..12: note = Table B: HLA-DRB1*12:02L
HNFLVQAGNVQL

SEQ ID NO: 24094 - protein, 13 aa, Severe acute respiratory syndrome coronavirus 2
  REGION 1..13: note = Table B: HLA-DRB1*12:02L
FVDRQTAQAAGTD

SEQ ID NO: 24095 - protein, 12 aa, Severe acute respiratory syndrome coronavirus 2
  REGION 1..12: note = Table B: HLA-DRB1*12:02L
FDIYNDKVAGFA

SEQ ID NO: 24096 - protein, 12 aa, Severe acute respiratory syndrome coronavirus 2
  REGION 1..12: note = Table B: HLA-DRB1*12:02L
NQVIVNNLDKSA

SEQ ID NO: 24097 - protein, 12 aa, Severe acute respiratory syndrome coronavirus 2
  REGION 1..12: note = Table B: HLA-DRB1*12:02L HLA-DRB1*14:54L HLA-DRB1*04:08L
LKSIAATRGATV

SEQ ID NO: 24098 - protein, 12 aa, Severe acute respiratory syndrome coronavirus 2
  REGION 1..12: note = Table B: HLA-DRB1*12:02L
ATVVIGTSKFYG

SEQ ID NO: 24099 - protein, 11 aa, Severe acute respiratory syndrome coronavirus 2
  REGION 1..11: note = Table B: HLA-DRB1*12:02L HLA-DRB1*14:54L
RVYSTGSNVFQ

SEQ ID NO: 24100 - protein, 15 aa, Severe acute respiratory syndrome coronavirus 2
  REGION 1..15: note = Table B: HLA-DRB3*01:01L HLA-DRB1*07:01L HLA-DRB1*08:02L
VAELEGIQYGRSGET

SEQ ID NO: 24101 - protein, 15 aa, Severe acute respiratory syndrome coronavirus 2
  REGION 1..15: note = Table B: HLA-DRB3*01:01L
HSYGADLKSFDLGDE

SEQ ID NO: 24102 - protein, 13 aa, Severe acute respiratory syndrome coronavirus 2
  REGION 1..13: note = Table B: HLA-DRB3*01:01L
HEIAWYTERSEKS

SEQ ID NO: 24103 - protein, 15 aa, Severe acute respiratory syndrome coronavirus 2
  REGION 1..15: note = Table B: HLA-DRB3*01:01L
PFEIKLAKKFDTFNG

SEQ ID NO: 24104 - protein, 13 aa, Severe acute respiratory syndrome coronavirus 2
  REGION 1..13: note = Table B: HLA-DRB3*01:01L
TSAFVETVKGLDY

SEQ ID NO: 24105 - protein, 14 aa, Severe acute respiratory syndrome coronavirus 2
  REGION 1..14: note = Table B: HLA-DRB3*01:01L HLA-DPA1*02:01-B1*13:01L
VETVKGLDYKAFKQ

SEQ ID NO: 24106 - protein, 13 aa, Severe acute respiratory syndrome coronavirus 2
  REGION 1..13: note = Table B: HLA-DRB3*01:01L
NITFELDERIDKV

SEQ ID NO: 24107 - protein, 13 aa, Severe acute respiratory syndrome coronavirus 2
  REGION 1..13: note = Table B: HLA-DRB3*01:01L
ITFELDERIDKVL

SEQ ID NO: 24108 - protein, 14 aa, Severe acute respiratory syndrome coronavirus 2
  REGION 1..14: note = Table B: HLA-DRB3*01:01L
KGEDIQLLKSAYEN

SEQ ID NO: 24109 - protein, 15 aa, Severe acute respiratory syndrome coronavirus 2
  REGION 1..15: note = Table B: HLA-DRB3*01:01L HLA-DRB1*08:02L
GEDIQLLKSAYENFN

SEQ ID NO: 24110 - protein, 16 aa, Severe acute respiratory syndrome coronavirus 2
  REGION 1..16: note = Table B: HLA-DRB3*01:01L HLA-DRB1*07:01L HLA-DRB1*10:01L
DIQLLKSAYENFNQHE

SEQ ID NO: 24111 - protein, 16 aa, Severe acute respiratory syndrome coronavirus 2
  REGION 1..16: note = Table B: HLA-DRB3*01:01L
DKNLYDKLVSSFLEMK

SEQ ID NO: 24112 - protein, 16 aa, Severe acute respiratory syndrome coronavirus 2
  REGION 1..16: note = Table B: HLA-DRB3*01:01L HLA-DRB1*15:03L
SKPSVEQRKQDDKKIK

SEQ ID NO: 24113 - protein, 12 aa, Severe acute respiratory syndrome coronavirus 2
  REGION 1..12: note = Table B: HLA-DRB3*01:01L HLA-DRB1*04:08L
TKAIVSTIQRKY

SEQ ID NO: 24114 - protein, 12 aa, Severe acute respiratory syndrome coronavirus 2
  REGION 1..12: note = Table B: HLA-DRB3*01:01L
KAIVSTIQRKYK

SEQ ID NO: 24115 - protein, 12 aa, Severe acute respiratory syndrome coronavirus 2
  REGION 1..12: note = Table B: HLA-DRB3*01:01L
AIVSTIQRKYKG

SEQ ID NO: 24116 - protein, 12 aa, Severe acute respiratory syndrome coronavirus 2
  REGION 1..12: note = Table B: HLA-DRB3*01:01L HLA-DPA1*02:01-B1*13:01L HLA-DRB1*08:03L
ARYMRSLKVPAT

SEQ ID NO: 24117 - protein, 14 aa, Severe acute respiratory syndrome coronavirus 2
  REGION 1..14: note = Table B: HLA-DRB3*01:01L
LGIEFLKRGDKSVY

SEQ ID NO: 24118 - protein, 14 aa, Severe acute respiratory syndrome coronavirus 2
  REGION 1..14: note = Table B: HLA-DRB3*01:01L HLA-DPA1*02:01-B1*13:01L HLA-DPA1*03:01-B1*105:01L HLA-DQA1*01:03-B1*06:01L
FDNLKTLLSLREVR

SEQ ID NO: 24119 - protein, 13 aa, Severe acute respiratory syndrome coronavirus 2
  REGION 1..13: note = Table B: HLA-DRB3*01:01L
FEYYHTTDPSFLG

SEQ ID NO: 24120 - protein, 16 aa, Severe acute respiratory syndrome coronavirus 2
  REGION 1..16: note = Table B: HLA-DRB3*01:01L
VEAVMYMGTLSYEQFK

SEQ ID NO: 24121 - protein, 16 aa, Severe acute respiratory syndrome coronavirus 2
  REGION 1..16: note = Table B: HLA-DRB3*01:01L HLA-DRB1*14:54L
IDGALLTKSSEYKGPI

SEQ ID NO: 24122 - protein, 13 aa, Severe acute respiratory syndrome coronavirus 2
  REGION 1..13: note = Table B: HLA-DRB3*01:01L
NSYTTTIKPVTYK

SEQ ID NO: 24123 - protein, 14 aa, Severe acute respiratory syndrome coronavirus 2
  REGION 1..14: note = Table B: HLA-DRB3*01:01L HLA-DQA1*05:05-B1*03:01L HLA-DRB1*07:01L
DDLNQLTGYKKPAS

SEQ ID NO: 24124 - protein, 14 aa, Severe acute respiratory syndrome coronavirus 2
  REGION 1..14: note = Table B: HLA-DRB3*01:01L HLA-DPA1*01:03-B1*02:01L HLA-DPA1*01:03-B1*104:01L HLA-DRB1*08:02L
VVGDIILKPANNSL

SEQ ID NO: 24125 - protein, 14 aa, Severe acute respiratory syndrome coronavirus 2
  REGION 1..14: note = Table B: HLA-DRB3*01:01L
KAGQKTYERHSLSH

SEQ ID NO: 24126 - protein, 15 aa, Severe acute respiratory syndrome coronavirus 2
  REGION 1..15: note = Table B: HLA-DRB3*01:01L
ERHSLSHFVNLDNLR

SEQ ID NO: 24127 - protein, 16 aa, Severe acute respiratory syndrome coronavirus 2
  REGION 1..16: note = Table B: HLA-DRB3*01:01L
DSAEVAVKMFDAYVNT

SEQ ID NO: 24128 - protein, 15 aa, Severe acute respiratory syndrome coronavirus 2
  REGION 1..15: note = Table B: HLA-DRB3*01:01L HLA-DRB1*04:08L
AKNVSLDNVLSTFIS

SEQ ID NO: 24129 - protein, 14 aa, Severe acute respiratory syndrome coronavirus 2
  REGION 1..14: note = Table B: HLA-DRB3*01:01L
TKDVVECLKLSHQS

SEQ ID NO: 24130 - protein, 14 aa, Severe acute respiratory syndrome coronavirus 2
  REGION 1..14: note = Table B: HLA-DRB3*01:01L
TYNKVENMTPRDLG

SEQ ID NO: 24131 - protein, 13 aa, Severe acute respiratory syndrome coronavirus 2
  REGION 1..13: note = Table B: HLA-DRB3*01:01L
KDFMSLSEQLRKQ

SEQ ID NO: 24132 - protein, 14 aa, Severe acute respiratory syndrome coronavirus 2
  REGION 1..14: note = Table B: HLA-DRB3*01:01L
DFMSLSEQLRKQIR

SEQ ID NO: 24133 - protein, 14 aa, Severe acute respiratory syndrome coronavirus 2
  REGION 1..14: note = Table B: HLA-DRB3*01:01L HLA-DRB1*15:01L
RVVTTFDSEYCRHG

SEQ ID NO: 24134 - protein, 14 aa, Severe acute respiratory syndrome coronavirus 2
  REGION 1..14: note = Table B: HLA-DRB3*01:01L HLA-DPA1*02:01-B1*13:01L
VVTTFDSEYCRHGT

SEQ ID NO: 24135 - protein, 13 aa, Severe acute respiratory syndrome coronavirus 2
  REGION 1..13: note = Table B: HLA-DRB3*01:01L
DVLLPLTQYNRYL

SEQ ID NO: 24136 - protein, 13 aa, Severe acute respiratory syndrome coronavirus 2
  REGION 1..13: note = Table B: HLA-DRB3*01:01L
YNRYLALYNKYKY

SEQ ID NO: 24137 - protein, 13 aa, Severe acute respiratory syndrome coronavirus 2
  REGION 1..13: note = Table B: HLA-DRB3*01:01L
NRYLALYNKYKYF

SEQ ID NO: 24138 - protein, 14 aa, Severe acute respiratory syndrome coronavirus 2
  REGION 1..14: note = Table B: HLA-DRB3*01:01L HLA-DRB1*15:03L
TFQSAVKRTIKGTH

SEQ ID NO: 24139 - protein, 12 aa, Severe acute respiratory syndrome coronavirus 2
  REGION 1..12: note = Table B: HLA-DRB3*01:01L HLA-DRB1*04:08L
ARTVYDDGARRV

SEQ ID NO: 24140 - protein, 13 aa, Severe acute respiratory syndrome coronavirus 2
  REGION 1..13: note = Table B: HLA-DRB3*01:01L HLA-DRB1*04:08L
RTVYDDGARRVWT

SEQ ID NO: 24141 - protein, 14 aa, Severe acute respiratory syndrome coronavirus 2
  REGION 1..14: note = Table B: HLA-DRB3*01:01L HLA-DPA1*01:03-B1*02:01L
LDNRATLQAIASEF

SEQ ID NO: 24142 - protein, 14 aa, Severe acute respiratory syndrome coronavirus 2
  REGION 1..14: note = Table B: HLA-DRB3*01:01L HLA-DRB1*07:01L HLA-DRB1*08:02L
SEFSSLPSYAAFAT

SEQ ID NO: 24143 - protein, 14 aa, Severe acute respiratory syndrome coronavirus 2
  REGION 1..14: note = Table B: HLA-DRB3*01:01L HLA-DRB1*15:03L
NGDSEVVLKKLKKS

SEQ ID NO: 24144 - protein, 14 aa, Severe acute respiratory syndrome coronavirus 2
  REGION 1..14: note = Table B: HLA-DRB3*01:01L
PLIVTALRANSAVK

SEQ ID NO: 24145 - protein, 14 aa, Severe acute respiratory syndrome coronavirus 2
  REGION 1..14: note = Table B: HLA-DRB3*01:01L HLA-DPA1*02:01-B1*13:01L
IVTALRANSAVKLQ

SEQ ID NO: 24146 - protein, 13 aa, Severe acute respiratory syndrome coronavirus 2
  REGION 1..13: note = Table B: HLA-DRB3*01:01L
YFVVKRHTFSNYQ

SEQ ID NO: 24147 - protein, 14 aa, Severe acute respiratory syndrome coronavirus 2
  REGION 1..14: note = Table B: HLA-DRB3*01:01L
FVVKRHTFSNYQHE

SEQ ID NO: 24148 - protein, 14 aa, Severe acute respiratory syndrome coronavirus 2
  REGION 1..14: note = Table B: HLA-DRB3*01:01L
EERLKLFDRYFKYW

SEQ ID NO: 24149 - protein, 16 aa, Severe acute respiratory syndrome coronavirus 2
  REGION 1..16: note = Table B: HLA-DRB3*01:01L
NAAISDYDYYRYNLPT

SEQ ID NO: 24150 - protein, 15 aa, Severe acute respiratory syndrome coronavirus 2
  REGION 1..15: note = Table B: HLA-DRB3*01:01L
ITQMNLKYAISAKNR

SEQ ID NO: 24151 - protein, 14 aa, Severe acute respiratory syndrome coronavirus 2
  REGION 1..14: note = Table B: HLA-DRB3*01:01L
RIMASLVLARKHTT

SEQ ID NO: 24152 - protein, 15 aa, Severe acute respiratory syndrome coronavirus 2
  REGION 1..15: note = Table B: HLA-DRB3*01:01L
ATTAYANSVFNICQA

SEQ ID NO: 24153 - protein, 14 aa, Severe acute respiratory syndrome coronavirus 2
  REGION 1..14: note = Table B: HLA-DRB3*01:01L HLA-DPA1*02:01-B1*13:01L
SQGLVASIKNFKSV

SEQ ID NO: 24154 - protein, 14 aa, Severe acute respiratory syndrome coronavirus 2
  REGION 1..14: note = Table B: HLA-DRB3*01:01L
DAYPLTKHPNQEYA

SEQ ID NO: 24155 - protein, 14 aa, Severe acute respiratory syndrome coronavirus 2
  REGION 1..14: note = Table B: HLA-DRB3*01:01L
VMLTNDNTSRYWEP

SEQ ID NO: 24156 - protein, 14 aa, Severe acute respiratory syndrome coronavirus 2
  REGION 1..14: note = Table B: HLA-DRB3*01:01L HLA-DRB1*08:02L
RIVYTACSHAAVDA

SEQ ID NO: 24157 - protein, 14 aa, Severe acute respiratory syndrome coronavirus 2
  REGION 1..14: note = Table B: HLA-DRB3*01:01L
NYDLSVVNARLRAK

SEQ ID NO: 24158 - protein, 16 aa, Severe acute respiratory syndrome coronavirus 2
  REGION 1..16: note = Table B: HLA-DRB3*01:01L HLA-DPA1*02:01-B1*13:01L
DNKLKAHKDKSAQCFK

SEQ ID NO: 24159 - protein, 13 aa, Severe acute respiratory syndrome coronavirus 2
  REGION 1..13: note = Table B: HLA-DRB3*01:01L
VREFLTRNPAWRK

SEQ ID NO: 24160 - protein, 13 aa, Severe acute respiratory syndrome coronavirus 2
  REGION 1..13: note = Table B: HLA-DRB3*01:01L
KLQFTSLEIPRRN

SEQ ID NO: 24161 - protein, 14 aa, Severe acute respiratory syndrome coronavirus 2
  REGION 1..14: note = Table B: HLA-DRB3*01:01L
LQFTSLEIPRRNVA

SEQ ID NO: 24162 - protein, 14 aa, Severe acute respiratory syndrome coronavirus 2
  REGION 1..14: note = Table B: HLA-DRB3*01:01L
RRNVATLQAENVTG

SEQ ID NO: 24163 - protein, 14 aa, Severe acute respiratory syndrome coronavirus 2
  REGION 1..14: note = Table B: HLA-DRB3*01:01L HLA-DPA1*01:02-B1*04:01L
AKRNIKPVPEVKIL

SEQ ID NO: 24164 - protein, 14 aa, Severe acute respiratory syndrome coronavirus 2
  REGION 1..14: note = Table B: HLA-DRB3*01:01L
VDIAANTVIWDYKR

SEQ ID NO: 24165 - protein, 16 aa, Severe acute respiratory syndrome coronavirus 2
  REGION 1..16: note = Table B: HLA-DRB3*01:01L
VDGVVQQLPETYFTQS

SEQ ID NO: 24166 - protein, 16 aa, Severe acute respiratory syndrome coronavirus 2
  REGION 1..16: note = Table B: HLA-DRB3*01:01L
DGVVQQLPETYFTQSR

SEQ ID NO: 24167 - protein, 15 aa, Severe acute respiratory syndrome coronavirus 2
  REGION 1..15: note = Table B: HLA-DRB3*01:01L
GGLHLLIGLAKRFKE

SEQ ID NO: 24168 - protein, 14 aa, Severe acute respiratory syndrome coronavirus 2
  REGION 1..14: note = Table B: HLA-DRB3*01:01L
DMYDPKTKNVTKEN

SEQ ID NO: 24169 - protein, 14 aa, Severe acute respiratory syndrome coronavirus 2
  REGION 1..14: note = Table B: HLA-DRB3*01:01L
FKIYSKHTPINLVR

SEQ ID NO: 24170 - protein, 15 aa, Severe acute respiratory syndrome coronavirus 2
  REGION 1..15: note = Table B: HLA-DRB3*01:01L
NGLTGTGVLTESNKK

SEQ ID NO: 24171 - protein, 14 aa, Severe acute respiratory syndrome coronavirus 2
  REGION 1..14: note = Table B: HLA-DRB3*01:01L HLA-DRB1*15:01L
NKKFLPFQQFGRDI

SEQ ID NO: 24172 - protein, 14 aa, Severe acute respiratory syndrome coronavirus 2
  REGION 1..14: note = Table B: HLA-DRB3*01:01L HLA-DRB1*15:01L
KKFLPFQQFGRDIA

SEQ ID NO: 24173 - protein, 14 aa, Severe acute respiratory syndrome coronavirus 2
  REGION 1..14: note = Table B: HLA-DRB3*01:01L
DIADTTDAVRDPQT

SEQ ID NO: 24174 - protein, 17 aa, Severe acute respiratory syndrome coronavirus 2
  REGION 1..17: note = Table B: HLA-DRB3*01:01L
DPQTLEILDITPCSFGG

SEQ ID NO: 24175 - protein, 14 aa, Severe acute respiratory syndrome coronavirus 2
  REGION 1..14: note = Table B: HLA-DRB3*01:01L
TPTWRVYSTGSNVF

SEQ ID NO: 24176 - protein, 14 aa, Severe acute respiratory syndrome coronavirus 2
  REGION 1..14: note = Table B: HLA-DRB3*01:01L
GGFNFSQILPDPSK

SEQ ID NO: 24177 - protein, 14 aa, Severe acute respiratory syndrome coronavirus 2
  REGION 1..14: note = Table B: HLA-DRB3*01:01L HLA-DRB1*07:01L
QIPFAMQMAYRFNG

SEQ ID NO: 24178 - protein, 13 aa, Severe acute respiratory syndrome coronavirus 2
  REGION 1..13: note = Table B: HLA-DRB3*01:01L HLA-DPA1*01:03-B1*104:01L HLA-DPA1*01:02-B1*04:01L HLA-DRB1*15:03L
RLDKVEAEVQIDR

SEQ ID NO: 24179 - protein, 14 aa, Severe acute respiratory syndrome coronavirus 2
  REGION 1..14: note = Table B: HLA-DRB3*01:01L
IDRLITGRLQSLQT

SEQ ID NO: 24180 - protein, 13 aa, Severe acute respiratory syndrome coronavirus 2
  REGION 1..13: note = Table B: HLA-DRB3*01:01L
HVTYVPAQEKNFT

SEQ ID NO: 24181 - protein, 15 aa, Severe acute respiratory syndrome coronavirus 2
  REGION 1..15: note = Table B: HLA-DRB3*01:01L
IVNNTVYDPLQPELD

SEQ ID NO: 24182 - protein, 13 aa, Severe acute respiratory syndrome coronavirus 2
  REGION 1..13: note = Table B: HLA-DRB3*01:01L
NTVYDPLQPELDS

SEQ ID NO: 24183 - protein, 12 aa, Severe acute respiratory syndrome coronavirus 2
  REGION 1..12: note = Table B: HLA-DRB3*01:01L
RWQLALSKGVHF

SEQ ID NO: 24184 - protein, 14 aa, Severe acute respiratory syndrome coronavirus 2
  REGION 1..14: note = Table B: HLA-DRB3*01:01L HLA-DRB1*07:01L
GDGTTSPISEHDYQ

SEQ ID NO: 24185 - protein, 13 aa, Severe acute respiratory syndrome coronavirus 2
  REGION 1..13: note = Table B: HLA-DRB3*01:01L
YVYSRVKNLNSSR

SEQ ID NO: 24186 - protein, 14 aa, Severe acute respiratory syndrome coronavirus 2
  REGION 1..14: note = Table B: HLA-DRB3*01:01L HLA-DPA1*01:03-B1*02:01L
NGTITVEELKKLLE

SEQ ID NO: 24187 - protein, 13 aa, Severe acute respiratory syndrome coronavirus 2
  REGION 1..13: note = Table B: HLA-DRB3*01:01L HLA-DRB1*04:08L
GAVILRGHLRIAG

SEQ ID NO: 24188 - protein, 14 aa, Severe acute respiratory syndrome coronavirus 2
  REGION 1..14: note = Table B: HLA-DRB3*01:01L
QRVAGDSGFAAYSR

SEQ ID NO: 24189 - protein, 16 aa, Severe acute respiratory syndrome coronavirus 2
  REGION 1..16: note = Table B: HLA-DRB3*01:01L HLA-DQA1*05:05-B1*03:01L
LSKSLTENKYSQLDEE

SEQ ID NO: 24190 - protein, 14 aa, Severe acute respiratory syndrome coronavirus 2
  REGION 1..14: note = Table B: HLA-DRB3*01:01L
VSPKLFIRQEEVQE

SEQ ID NO: 24191 - protein, 15 aa, Severe acute respiratory syndrome coronavirus 2
  REGION 1..15: note = Table B: HLA-DRB3*01:01L
PCPIHFYSKWYIRVG

SEQ ID NO: 24192 - protein, 12 aa, Severe acute respiratory syndrome coronavirus 2
  REGION 1..12: note = Table B: HLA-DRB3*01:01L HLA-DRB1*15:03L
TALTQHGKEDLK

SEQ ID NO: 24193 - protein, 16 aa, Severe acute respiratory syndrome coronavirus 2
  REGION 1..16: note = Table B: HLA-DRB3*01:01L
RRIRGGDGKMKDLSPR

SEQ ID NO: 24194 - protein, 16 aa, Severe acute respiratory syndrome coronavirus 2
  REGION 1..16: note = Table B: HLA-DRB3*01:01L
SAAEASKKPRQKRTAT

SEQ ID NO: 24195 - protein, 14 aa, Severe acute respiratory syndrome coronavirus 2
  REGION 1..14: note = Table B: HLA-DRB3*01:01L
KAYNVTQAFGRRGP

SEQ ID NO: 24196 - protein, 13 aa, Severe acute respiratory syndrome coronavirus 2
  REGION 1..13: note = Table B: HLA-DRB3*01:01L
FKDQVILLNKHID

SEQ ID NO: 24197 - protein, 16 aa, Severe acute respiratory syndrome coronavirus 2
  REGION 1..16: note = Table B: HLA-DPA1*02:01-B1*13:01L
GLVEVEKGVLPQLEQP

SEQ ID NO: 24198 - protein, 14 aa, Severe acute respiratory syndrome coronavirus 2
  REGION 1..14: note = Table B: HLA-DPA1*02:01-B1*13:01L
LEQPYVFIKRSDAR

SEQ ID NO: 24199 - protein, 14 aa, Severe acute respiratory syndrome coronavirus 2
  REGION 1..14: note = Table B: HLA-DPA1*02:01-B1*13:01L
VFIKRSDARTAPHG

SEQ ID NO: 24200 - protein, 15 aa, Severe acute respiratory syndrome coronavirus 2
  REGION 1..15: note = Table B: HLA-DPA1*02:01-B1*13:01L
FIKRSDARTAPHGHV

SEQ ID NO: 24201 - protein, 18 aa, Severe acute respiratory syndrome coronavirus 2
  REGION 1..18: note = Table B: HLA-DPA1*02:01-B1*13:01L
SDARTAPHGHVMVELVAE

SEQ ID NO: 24202 - protein, 13 aa, Severe acute respiratory syndrome coronavirus 2
  REGION 1..13: note = Table B: HLA-DPA1*02:01-B1*13:01L
GADLKSFDLGDEL

SEQ ID NO: 24203 - protein, 14 aa, Severe acute respiratory syndrome coronavirus 2
  REGION 1..14: note = Table B: HLA-DPA1*02:01-B1*13:01L
GPDGYPLECIKDLL

SEQ ID NO: 24204 - protein, 14 aa, Severe acute respiratory syndrome coronavirus 2
  REGION 1..14: note = Table B: HLA-DPA1*02:01-B1*13:01L
RAGKASCTLSEQLD

SEQ ID NO: 24205 - protein, 10 aa, Severe acute respiratory syndrome coronavirus 2
  REGION 1..10: note = Table B: HLA-DPA1*02:01-B1*13:01L HLA-DQA1*01:03-B1*06:01L HLA-DQA1*02:01-B1*03:03L
PFEIKLAKKF

SEQ ID NO: 24206 - protein, 14 aa, Severe acute respiratory syndrome coronavirus 2
  REGION 1..14: note = Table B: HLA-DPA1*02:01-B1*13:01L
VVGEGSEGLNDNLL

SEQ ID NO: 24207 - protein, 15 aa, Severe acute respiratory syndrome coronavirus 2
  REGION 1..15: note = Table B: HLA-DPA1*02:01-B1*13:01L
GDFKLNEEIAIILAS

SEQ ID NO: 24208 - protein, 14 aa, Severe acute respiratory syndrome coronavirus 2
  REGION 1..14: note = Table B: HLA-DPA1*02:01-B1*13:01L
ASTSAFVETVKGLD

SEQ ID NO: 24209 - protein, 14 aa, Severe acute respiratory syndrome coronavirus 2
  REGION 1..14: note = Table B: HLA-DPA1*02:01-B1*13:01L HLA-DPA1*01:03-B1*104:01L
LQKAAITILDGISQ

SEQ ID NO: 24210 - protein, 15 aa, Severe acute respiratory syndrome coronavirus 2
  REGION 1..15: note = Table B: HLA-DPA1*02:01-B1*13:01L HLA-DPA1*01:03-B1*104:01L
YSLRLIDAMMFTSDL

SEQ ID NO: 24211 - protein, 11 aa, Severe acute respiratory syndrome coronavirus 2
  REGION 1..11: note = Table B: HLA-DPA1*02:01-B1*13:01L
KLKALNLGETF

SEQ ID NO: 24212 - protein, 14 aa, Severe acute respiratory syndrome coronavirus 2
  REGION 1..14: note = Table B: HLA-DPA1*02:01-B1*13:01L
VKSREETGLLMPLK

SEQ ID NO: 24213 - protein, 14 aa, Severe acute respiratory syndrome coronavirus 2
  REGION 1..14: note = Table B: HLA-DPA1*02:01-B1*13:01L HLA-DRB1*15:03L
VTNNTFTLKGGAPT

SEQ ID NO: 24214 - protein, 14 aa, Severe acute respiratory syndrome coronavirus 2
  REGION 1..14: note = Table B: HLA-DPA1*02:01-B1*13:01L
LDERIDKVLNEKCS

SEQ ID NO: 24215 - protein, 15 aa, Severe acute respiratory syndrome coronavirus 2
  REGION 1..15: note = Table B: HLA-DPA1*02:01-B1*13:01L
LNEKCSAYTVELGTE

SEQ ID NO: 24216 - protein, 12 aa, Severe acute respiratory syndrome coronavirus 2
  REGION 1..12: note = Table B: HLA-DPA1*02:01-B1*13:01L
VIKTLQPVSELL

SEQ ID NO: 24217 - protein, 10 aa, Severe acute respiratory syndrome coronavirus 2
  REGION 1..10: note = Table B: HLA-DPA1*02:01-B1*13:01L
EWSMATYYLF

SEQ ID NO: 24218 - protein, 15 aa, Severe acute respiratory syndrome coronavirus 2
  REGION 1..15: note = Table B: HLA-DPA1*02:01-B1*13:01L
ASHMYCSFYPPDEDE

SEQ ID NO: 24219 - protein, 14 aa, Severe acute respiratory syndrome coronavirus 2
  REGION 1..14: note = Table B: HLA-DPA1*02:01-B1*13:01L
AALQPEEEQEEDWL

SEQ ID NO: 24220 - protein, 15 aa, Severe acute respiratory syndrome coronavirus 2
  REGION 1..15: note = Table B: HLA-DPA1*02:01-B1*13:01L
LKLTDNVYIKNADIV

SEQ ID NO: 24221 - protein, 16 aa, Severe acute respiratory syndrome coronavirus 2
  REGION 1..16: note = Table B: HLA-DPA1*02:01-B1*13:01L HLA-DRB1*07:01L
IKNADIVEEAKKVKPT

SEQ ID NO: 24222 - protein, 14 aa, Severe acute respiratory syndrome coronavirus 2
  REGION 1..14: note = Table B: HLA-DPA1*02:01-B1*13:01L
TNNAMQVESDDYIA

SEQ ID NO: 24223 - protein, 15 aa, Severe acute respiratory syndrome coronavirus 2
  REGION 1..15: note = Table B: HLA-DPA1*02:01-B1*13:01L
ENFNQHEVLLAPLLS

SEQ ID NO: 24224 - protein, 15 aa, Severe acute respiratory syndrome coronavirus 2
  REGION 1..15: note = Table B: HLA-DPA1*02:01-B1*13:01L
HSLRVCVDTVRTNVY

SEQ ID NO: 24225 - protein, 19 aa, Severe acute respiratory syndrome coronavirus 2
  REGION 1..19: note = Table B: HLA-DPA1*02:01-B1*13:01L
PFITESKPSVEQRKQDDKK

SEQ ID NO: 24226 - protein, 13 aa, Severe acute respiratory syndrome coronavirus 2
  REGION 1..13: note = Table B: HLA-DPA1*02:01-B1*13:01L
YIDINGNLHPDSA

SEQ ID NO: 24227 - protein, 14 aa, Severe acute respiratory syndrome coronavirus 2
  REGION 1..14: note = Table B: HLA-DPA1*02:01-B1*13:01L
IDINGNLHPDSATL

SEQ ID NO: 24228 - protein, 15 aa, Severe acute respiratory syndrome coronavirus 2
  REGION 1..15: note = Table B: HLA-DPA1*02:01-B1*13:01L HLA-DPA1*01:03-B1*104:01L HLA-DRB1*15:01L
INGNLHPDSATLVSD

SEQ ID NO: 24229 - protein, 13 aa, Severe acute respiratory syndrome coronavirus 2
  REGION 1..13: note = Table B: HLA-DPA1*02:01-B1*13:01L
YGARFYFYTSKTT

SEQ ID NO: 24230 - protein, 12 aa, Severe acute respiratory syndrome coronavirus 2
  REGION 1..12: note = Table B: HLA-DPA1*02:01-B1*13:01L
LINTLNDLNETL

SEQ ID NO: 24231 - protein, 14 aa, Severe acute respiratory syndrome coronavirus 2
  REGION 1..14: note = Table B: HLA-DPA1*02:01-B1*13:01L HLA-DRB1*15:03L
GYVTHGLNLEEAAR

SEQ ID NO: 24232 - protein, 13 aa, Severe acute respiratory syndrome coronavirus 2
  REGION 1..13: note = Table B: HLA-DPA1*02:01-B1*13:01L
IETISLAGSYKDW

SEQ ID NO: 24233 - protein, 16 aa, Severe acute respiratory syndrome coronavirus 2
  REGION 1..16: note = Table B: HLA-DPA1*02:01-B1*13:01L
GQSTQLGIEFLKRGDK

SEQ ID NO: 24234 - protein, 16 aa, Severe acute respiratory syndrome coronavirus 2
  REGION 1..16: note = Table B: HLA-DPA1*02:01-B1*13:01L
LKRGDKSVYYTSNPTT

SEQ ID NO: 24235 - protein, 15 aa, Severe acute respiratory syndrome coronavirus 2
  REGION 1..15: note = Table B: HLA-DPA1*02:01-B1*13:01L
ADVTKIKPHNSHEGK

SEQ ID NO: 24236 - protein, 12 aa, Severe acute respiratory syndrome coronavirus 2
  REGION 1..12: note = Table B: HLA-DPA1*02:01-B1*13:01L HLA-DQA1*01:03-B1*06:01L HLA-DRB1*15:03L
RYMSALNHTKKW

SEQ ID NO: 24237 - protein, 10 aa, Severe acute respiratory syndrome coronavirus 2
  REGION 1..10: note = Table B: HLA-DPA1*02:01-B1*13:01L HLA-DQA1*03:01-B1*03:02L HLA-DRB1*16:01L HLA-DQA1*01:03-B1*06:01L HLA-DQA1*02:01-B1*03:03L
KWKYPQVNGL

SEQ ID NO: 24238 - protein, 15 aa, Severe acute respiratory syndrome coronavirus 2
  REGION 1..15: note = Table B: HLA-DPA1*02:01-B1*13:01L
ILAYCNKTVGELGDV

SEQ ID NO: 24239 - protein, 12 aa, Severe acute respiratory syndrome coronavirus 2
  REGION 1..12: note = Table B: HLA-DPA1*02:01-B1*13:01L
VGELGDVRETMS

SEQ ID NO: 24240 - protein, 14 aa, Severe acute respiratory syndrome coronavirus 2
  REGION 1..14: note = Table B: HLA-DPA1*02:01-B1*13:01L
LKHGTFTCASEYTG

SEQ ID NO: 24241 - protein, 16 aa, Severe acute respiratory syndrome coronavirus 2
  REGION 1..16: note = Table B: HLA-DPA1*02:01-B1*13:01L
GNYQCGHYKHITSKET

SEQ ID NO: 24242 - protein, 11 aa, Severe acute respiratory syndrome coronavirus 2
  REGION 1..11: note = Table B: HLA-DPA1*02:01-B1*13:01L HLA-DQA1*01:03-B1*06:01L HLA-DRB1*15:03L
HYKHITSKETL

SEQ ID NO: 24243 - protein, 14 aa, Severe acute respiratory syndrome coronavirus 2
  REGION 1..14: note = Table B: HLA-DPA1*02:01-B1*13:01L
TTIKPVTYKLDGVV

SEQ ID NO: 24244 - protein, 14 aa, Severe acute respiratory syndrome coronavirus 2
  REGION 1..14: note = Table B: HLA-DPA1*02:01-B1*13:01L
YFTEQPIDLVPNQP

SEQ ID NO: 24245 - protein, 14 aa, Severe acute respiratory syndrome coronavirus 2
  REGION 1..14: note = Table B: HLA-DPA1*02:01-B1*13:01L
FDNFKFVCDNIKFA

SEQ ID NO: 24246 - protein, 13 aa, Severe acute respiratory syndrome coronavirus 2
  REGION 1..13: note = Table B: HLA-DPA1*02:01-B1*13:01L HLA-DQA1*01:03-B1*06:01L
LNQLTGYKKPASR

SEQ ID NO: 24247 - protein, 14 aa, Severe acute respiratory syndrome coronavirus 2
  REGION 1..14: note = Table B: HLA-DPA1*02:01-B1*13:01L HLA-DPA1*03:01-B1*105:01L HLA-DRB1*08:02L
NQLTGYKKPASREL

SEQ ID NO: 24248 - protein, 16 aa, Severe acute respiratory syndrome coronavirus 2
  REGION 1..16: note = Table B: HLA-DPA1*02:01-B1*13:01L
AKLLHKPIVWHVNNAT

SEQ ID NO: 24249 - protein, 14 aa, Severe acute respiratory syndrome coronavirus 2
  REGION 1..14: note = Table B: HLA-DPA1*02:01-B1*13:01L
LHKPIVWHVNNATN

SEQ ID NO: 24250 - protein, 13 aa, Severe acute respiratory syndrome coronavirus 2
  REGION 1..13: note = Table B: HLA-DPA1*02:01-B1*13:01L
DLKPVSEEVVENP

SEQ ID NO: 24251 - protein, 16 aa, Severe acute respiratory syndrome coronavirus 2
  REGION 1..16: note = Table B: HLA-DPA1*02:01-B1*13:01L
DVLECNVKTTEVVGDI

SEQ ID NO: 24252 - protein, 15 aa, Severe acute respiratory syndrome coronavirus 2
  REGION 1..15: note = Table B: HLA-DPA1*02:01-B1*13:01L
IILKPANNSLKITEE

SEQ ID NO: 24253 - protein, 13 aa, Severe acute respiratory syndrome coronavirus 2
  REGION 1..13: note = Table B: HLA-DPA1*02:01-B1*13:01L
LKITEEVGHTDLM

SEQ ID NO: 24254 - protein, 12 aa, Severe acute respiratory syndrome coronavirus 2
  REGION 1..12: note = Table B: HLA-DPA1*02:01-B1*13:01L HLA-DPA1*01:03-B1*104:01L
KVVSTTTNIVTR

SEQ ID NO: 24255 - protein, 14 aa, Severe acute respiratory syndrome coronavirus 2
  REGION 1..14: note = Table B: HLA-DPA1*02:01-B1*13:01L HLA-DPA1*01:02-B1*04:01L
SRIKASMPTTIAKN

SEQ ID NO: 24256 - protein, 14 aa, Severe acute respiratory syndrome coronavirus 2
  REGION 1..14: note = Table B: HLA-DPA1*02:01-B1*13:01L HLA-DPA1*03:01-B1*105:01L HLA-DQA1*01:03-B1*06:01L
VKSVGKFCLEASFN

SEQ ID NO: 24257 - protein, 11 aa, Severe acute respiratory syndrome coronavirus 2
  REGION 1..11: note = Table B: HLA-DPA1*02:01-B1*13:01L
YPSLETIQITI

SEQ ID NO: 24258 - protein, 10 aa, Severe acute respiratory syndrome coronavirus 2
  REGION 1..10: note = Table B: HLA-DPA1*02:01-B1*13:01L HLA-DQA1*01:03-B1*06:01L
IFFASFYYVW

SEQ ID NO: 24259 - protein, 13 aa, Severe acute respiratory syndrome coronavirus 2
  REGION 1..13: note = Table B: HLA-DPA1*02:01-B1*13:01L
LQFKRPINPTDQS

SEQ ID NO: 24260 - protein, 16 aa, Severe acute respiratory syndrome coronavirus 2
  REGION 1..16: note = Table B: HLA-DPA1*02:01-B1*13:01L
PILLLDQALVSDVGDS

SEQ ID NO: 24261 - protein, 14 aa, Severe acute respiratory syndrome coronavirus 2
  REGION 1..14: note = Table B: HLA-DPA1*02:01-B1*13:01L HLA-DPA1*03:01-B1*105:01L
LDQALVSDVGDSAE

SEQ ID NO: 24262 - protein, 13 aa, Severe acute respiratory syndrome coronavirus 2
  REGION 1..13: note = Table B: HLA-DPA1*02:01-B1*13:01L
LTYNKVENMTPRD

SEQ ID NO: 24263 - protein, 14 aa, Severe acute respiratory syndrome coronavirus 2
  REGION 1..14: note = Table B: HLA-DPA1*02:01-B1*13:01L
RHINAQVAKSHNIA

SEQ ID NO: 24264 - protein, 13 aa, Severe acute respiratory syndrome coronavirus 2
  REGION 1..13: note = Table B: HLA-DPA1*02:01-B1*13:01L
QVAKSHNIALIWN

SEQ ID NO: 24265 - protein, 15 aa, Severe acute respiratory syndrome coronavirus 2
  REGION 1..15: note = Table B: HLA-DPA1*02:01-B1*13:01L
KQIRSAAKKNNLPFK

SEQ ID NO: 24266 - protein, 15 aa, Severe acute respiratory syndrome coronavirus 2
  REGION 1..15: note = Table B: HLA-DPA1*02:01-B1*13:01L
TDTCFANKHADFDTW

SEQ ID NO: 24267 - protein, 12 aa, Severe acute respiratory syndrome coronavirus 2
  REGION 1..12: note = Table B: HLA-DPA1*02:01-B1*13:01L
GSYTNDKACPLI

SEQ ID NO: 24268 - protein, 16 aa, Severe acute respiratory syndrome coronavirus 2
  REGION 1..16: note = Table B: HLA-DPA1*02:01-B1*13:01L
VLAAECTIFKDASGKP

SEQ ID NO: 24269 - protein, 14 aa, Severe acute respiratory syndrome coronavirus 2
  REGION 1..14: note = Table B: HLA-DPA1*02:01-B1*13:01L
TSGRWVLNNDYYRS

SEQ ID NO: 24270 - protein, 11 aa, Severe acute respiratory syndrome coronavirus 2
  REGION 1..11: note = Table B: HLA-DPA1*02:01-B1*13:01L
AYIICISTKHF

SEQ ID NO: 24271 - protein, 16 aa, Severe acute respiratory syndrome coronavirus 2
  REGION 1..16: note = Table B: HLA-DPA1*02:01-B1*13:01L
YWFFSNYLKRRVVFNG

SEQ ID NO: 24272 - protein, 16 aa, Severe acute respiratory syndrome coronavirus 2
  REGION 1..16: note = Table B: HLA-DPA1*02:01-B1*13:01L
FFSNYLKRRVVFNGVS

SEQ ID NO: 24273 - protein, 12 aa, Severe acute respiratory syndrome coronavirus 2
  REGION 1..12: note = Table B: HLA-DPA1*02:01-B1*13:01L HLA-DPA1*03:01-B1*105:01L HLA-DRB1*16:01L HLA-DRB1*15:03L
KYKYFSGAMDTT

SEQ ID NO: 24274 - protein, 13 aa, Severe acute respiratory syndrome coronavirus 2
  REGION 1..13: note = Table B: HLA-DPA1*02:01-B1*13:01L
SYREAACCHLAKA

SEQ ID NO: 24275 - protein, 16 aa, Severe acute respiratory syndrome coronavirus 2
  REGION 1..16: note = Table B: HLA-DPA1*02:01-B1*13:01L
PPQTSITSAVLQSGFR

SEQ ID NO: 24276 - protein, 13 aa, Severe acute respiratory syndrome coronavirus 2
  REGION 1..13: note = Table B: HLA-DPA1*02:01-B1*13:01L
GFRKMAFPSGKVE

SEQ ID NO: 24277 - protein, 13 aa, Severe acute respiratory syndrome coronavirus 2
  REGION 1..13: note = Table B: HLA-DPA1*02:01-B1*13:01L
FRKMAFPSGKVEG

SEQ ID NO: 24278 - protein, 16 aa, Severe acute respiratory syndrome coronavirus 2
  REGION 1..16: note = Table B: HLA-DPA1*02:01-B1*13:01L
NGLWLDDVVYCPRHVI

SEQ ID NO: 24279 - protein, 19 aa, Severe acute respiratory syndrome coronavirus 2
  REGION 1..19: note = Table B: HLA-DPA1*02:01-B1*13:01L
CPRHVICTSEDMLNPNYED

SEQ ID NO: 24280 - protein, 14 aa, Severe acute respiratory syndrome coronavirus 2
  REGION 1..14: note = Table B: HLA-DPA1*02:01-B1*13:01L HLA-DPA1*03:01-B1*105:01L
AGNVQLRVIGHSMQ

SEQ ID NO: 24281 - protein, 10 aa, Severe acute respiratory syndrome coronavirus 2
  REGION 1..10: note = Table B: HLA-DPA1*02:01-B1*13:01L HLA-DQA1*01:03-B1*06:01L HLA-DQA1*02:01-B1*03:03L
NRFTTTLNDF

SEQ ID NO: 24282 - protein, 11 aa, Severe acute respiratory syndrome coronavirus 2
  REGION 1..11: note = Table B: HLA-DPA1*02:01-B1*13:01L HLA-DRB1*15:03L
RFTTTLNDFNL

SEQ ID NO: 24283 - protein, 13 aa, Severe acute respiratory syndrome coronavirus 2
  REGION 1..13: note = Table B: HLA-DPA1*02:01-B1*13:01L
RTILGSALLEDEF

SEQ ID NO: 24284 - protein, 13 aa, Severe acute respiratory syndrome coronavirus 2
  REGION 1..13: note = Table B: HLA-DPA1*02:01-B1*13:01L HLA-DRB1*16:01L
ALLEDEFTPFDVV

SEQ ID NO: 24285 - protein, 15 aa, Severe acute respiratory syndrome coronavirus 2
  REGION 1..15: note = Table B: HLA-DPA1*02:01-B1*13:01L HLA-DPA1*01:03-B1*104:01L
FKLKDCVMYASAVVL

SEQ ID NO: 24286 - protein, 19 aa, Severe acute respiratory syndrome coronavirus 2
  REGION 1..19: note = Table B: HLA-DPA1*02:01-B1*13:01L
PPKNSIDAFKLNIKLLGVG

SEQ ID NO: 24287 - protein, 16 aa, Severe acute respiratory syndrome coronavirus 2
  REGION 1..16: note = Table B: HLA-DPA1*02:01-B1*13:01L
GKPCIKVATVQSKMSD

SEQ ID NO: 24288 - protein, 15 aa, Severe acute respiratory syndrome coronavirus 2
  REGION 1..15: note = Table B: HLA-DPA1*02:01-B1*13:01L
GAVDINKLCEEMLDN

SEQ ID NO: 24289 - protein, 13 aa, Severe acute respiratory syndrome coronavirus 2
  REGION 1..13: note = Table B: HLA-DPA1*02:01-B1*13:01L
KRAKVTSAMQTML

SEQ ID NO: 24290 - protein, 14 aa, Severe acute respiratory syndrome coronavirus 2
  REGION 1..14: note = Table B: HLA-DPA1*02:01-B1*13:01L
KIVQLSEISMDNSP

SEQ ID NO: 24291 - protein, 16 aa, Severe acute respiratory syndrome coronavirus 2
  REGION 1..16: note = Table B: HLA-DPA1*02:01-B1*13:01L
ISMDNSPNLAWPLIVT

SEQ ID NO: 24292 - protein, 14 aa, Severe acute respiratory syndrome coronavirus 2
  REGION 1..14: note = Table B: HLA-DPA1*02:01-B1*13:01L HLA-DRB1*04:08L
AGNATEVPANSTVL

SEQ ID NO: 24293 - protein, 16 aa, Severe acute respiratory syndrome coronavirus 2
  REGION 1..16: note = Table B: HLA-DPA1*02:01-B1*13:01L
GMWKGYGCSCDQLREP

SEQ ID NO: 24294 - protein, 14 aa, Severe acute respiratory syndrome coronavirus 2
  REGION 1..14: note = Table B: HLA-DPA1*02:01-B1*13:01L
YNDKVAGFAKFLKT

SEQ ID NO: 24295 - protein, 18 aa, Severe acute respiratory syndrome coronavirus 2
  REGION 1..18: note = Table B: HLA-DPA1*02:01-B1*13:01L
GFAKFLKTNCCRFQEKDE

SEQ ID NO: 24296 - protein, 14 aa, Severe acute respiratory syndrome coronavirus 2
  REGION 1..14: note = Table B: HLA-DPA1*02:01-B1*13:01L HLA-DPA1*03:01-B1*105:01L
FQEKDEDDNLIDSY

SEQ ID NO: 24297 - protein, 15 aa, Severe acute respiratory syndrome coronavirus 2
  REGION 1..15: note = Table B: HLA-DPA1*02:01-B1*13:01L
DEDDNLIDSYFVVKR

SEQ ID NO: 24298 - protein, 12 aa, Severe acute respiratory syndrome coronavirus 2
  REGION 1..12: note = Table B: HLA-DPA1*02:01-B1*13:01L HLA-DRB1*15:03L
FKFRIDGDMVPH

SEQ ID NO: 24299 - protein, 14 aa, Severe acute respiratory syndrome coronavirus 2
  REGION 1..14: note = Table B: HLA-DPA1*02:01-B1*13:01L
IDGDMVPHISRQRL

SEQ ID NO: 24300 - protein, 11 aa, Severe acute respiratory syndrome coronavirus 2
  REGION 1..11: note = Table B: HLA-DPA1*02:01-B1*13:01L HLA-DQA1*01:03-B1*06:01L
KYTMADLVYAL

SEQ ID NO: 24301 - protein, 13 aa, Severe acute respiratory syndrome coronavirus 2
  REGION 1..13: note = Table B: HLA-DPA1*02:01-B1*13:01L
ALRHFDEGNCDTL

SEQ ID NO: 24302 - protein, 15 aa, Severe acute respiratory syndrome coronavirus 2
  REGION 1..15: note = Table B: HLA-DPA1*02:01-B1*13:01L
LKEILVTYNCCDDDY

SEQ ID NO: 24303 - protein, 14 aa, Severe acute respiratory syndrome coronavirus 2
  REGION 1..14: note = Table B: HLA-DPA1*02:01-B1*13:01L
ALLKTVQFCDAMRN

SEQ ID NO: 24304 - protein, 15 aa, Severe acute respiratory syndrome coronavirus 2
  REGION 1..15: note = Table B: HLA-DPA1*02:01-B1*13:01L HLA-DRB1*15:03L
DNQDLNGNWYDFGDF

SEQ ID NO: 24305 - protein, 10 aa, Severe acute respiratory syndrome coronavirus 2
  REGION 1..10: note = Table B: HLA-DPA1*02:01-B1*13:01L HLA-DQA1*01:03-B1*06:01L
SYYSLLMPIL

SEQ ID NO: 24306 - protein, 13 aa, Severe acute respiratory syndrome coronavirus 2
  REGION 1..13: note = Table B: HLA-DPA1*02:01-B1*13:01L
DLTKPYIKWDLLK

SEQ ID NO: 24307 - protein, 11 aa, Severe acute respiratory syndrome coronavirus 2
  REGION 1..11: note = Table B: HLA-DPA1*02:01-B1*13:01L
VFPPTSFGPLV

SEQ ID NO: 24308 - protein, 14 aa, Severe acute respiratory syndrome coronavirus 2
  REGION 1..14: note = Table B: HLA-DPA1*02:01-B1*13:01L HLA-DRB1*15:03L
FGPLVRKIFVDGVP

SEQ ID NO: 24309 - protein, 14 aa, Severe acute respiratory syndrome coronavirus 2
  REGION 1..14: note = Table B: HLA-DPA1*02:01-B1*13:01L
TGYHFRELGVVHNQ

SEQ ID NO: 24310 - protein, 13 aa, Severe acute respiratory syndrome coronavirus 2
  REGION 1..13: note = Table B: HLA-DPA1*02:01-B1*13:01L
YAADPAMHAASGN

SEQ ID NO: 24311 - protein, 14 aa, Severe acute respiratory syndrome coronavirus 2
  REGION 1..14: note = Table B: HLA-DPA1*02:01-B1*13:01L HLA-DRB1*16:01L HLA-DRB1*15:03L
PGNFNKDFYDFAVS

SEQ ID NO: 24312 - protein, 14 aa, Severe acute respiratory syndrome coronavirus 2
  REGION 1..14: note = Table B: HLA-DPA1*02:01-B1*13:01L HLA-DRB1*07:01L
KHFFFAQDGNAAIS

SEQ ID NO: 24313 - protein, 14 aa, Severe acute respiratory syndrome coronavirus 2
  REGION 1..14: note = Table B: HLA-DPA1*02:01-B1*13:01L HLA-DRB1*15:03L
ISDYDYYRYNLPTM

SEQ ID NO: 24314 - protein, 16 aa, Severe acute respiratory syndrome coronavirus 2
  REGION 1..16: note = Table B: HLA-DPA1*02:01-B1*13:01L
IPTITQMNLKYAISAK

SEQ ID NO: 24315 - protein, 13 aa, Severe acute respiratory syndrome coronavirus 2
  REGION 1..13: note = Table B: HLA-DPA1*02:01-B1*13:01L
NRARTVAGVSICS

SEQ ID NO: 24316 - protein, 13 aa, Severe acute respiratory syndrome coronavirus 2
  REGION 1..13: note = Table B: HLA-DPA1*02:01-B1*13:01L
ATRGATVVIGTSK

SEQ ID NO: 24317 - protein, 10 aa, Severe acute respiratory syndrome coronavirus 2
  REGION 1..10: note = Table B: HLA-DPA1*02:01-B1*13:01L HLA-DQA1*01:03-B1*06:01L
KFYGGWHNML

SEQ ID NO: 24318 - protein, 12 aa, Severe acute respiratory syndrome coronavirus 2
  REGION 1..12: note = Table B: HLA-DPA1*02:01-B1*13:01L
LKTVYSDVENPH

SEQ ID NO: 24319 - protein, 15 aa, Severe acute respiratory syndrome coronavirus 2
  REGION 1..15: note = Table B: HLA-DPA1*02:01-B1*13:01L
LRIMASLVLARKHTT

SEQ ID NO: 24320 - protein, 12 aa, Severe acute respiratory syndrome coronavirus 2
  REGION 1..12: note = Table B: HLA-DPA1*02:01-B1*13:01L HLA-DRB1*16:01L
RFYRLANECAQV

SEQ ID NO: 24321 - protein, 14 aa, Severe acute respiratory syndrome coronavirus 2
  REGION 1..14: note = Table B: HLA-DPA1*02:01-B1*13:01L HLA-DPA1*01:03-B1*104:01L
YRLANECAQVLSEM

SEQ ID NO: 24322 - protein, 10 aa, Severe acute respiratory syndrome coronavirus 2
  REGION 1..10: note = Table B: HLA-DPA1*02:01-B1*13:01L HLA-DQA1*01:03-B1*06:01L
AYANSVFNIC

SEQ ID NO: 24323 - protein, 14 aa, Severe acute respiratory syndrome coronavirus 2
  REGION 1..14: note = Table B: HLA-DPA1*02:01-B1*13:01L
QHRLYECLYRNRDV

SEQ ID NO: 24324 - protein, 11 aa, Severe acute respiratory syndrome coronavirus 2
  REGION 1..11: note = Table B: HLA-DPA1*02:01-B1*13:01L
TYASQGLVASI

SEQ ID NO: 24325 - protein, 16 aa, Severe acute respiratory syndrome coronavirus 2
  REGION 1..16: note = Table B: HLA-DPA1*02:01-B1*13:01L
MLVKQGDDYVYLPYPD

SEQ ID NO: 24326 - protein, 13 aa, Severe acute respiratory syndrome coronavirus 2
  REGION 1..13: note = Table B: HLA-DPA1*02:01-B1*13:01L
AIDAYPLTKHPNQ

SEQ ID NO: 24327 - protein, 13 aa, Severe acute respiratory syndrome coronavirus 2
  REGION 1..13: note = Table B: HLA-DPA1*02:01-B1*13:01L
IRKLHDELTGHML

SEQ ID NO: 24328 - protein, 14 aa, Severe acute respiratory syndrome coronavirus 2
  REGION 1..14: note = Table B: HLA-DPA1*02:01-B1*13:01L
YDHVISTSHKLVLS

SEQ ID NO: 24329 - protein, 14 aa, Severe acute respiratory syndrome coronavirus 2
  REGION 1..14: note = Table B: HLA-DPA1*02:01-B1*13:01L HLA-DQA1*05:05-B1*03:01L HLA-DQA1*01:03-B1*06:01L
ATEETFKLSYGIAT

SEQ ID NO: 24330 - protein, 13 aa, Severe acute respiratory syndrome coronavirus 2
  REGION 1..13: note = Table B: HLA-DPA1*02:01-B1*13:01L
LSDRELHLSWEVG

SEQ ID NO: 24331 - protein, 14 aa, Severe acute respiratory syndrome coronavirus 2
  REGION 1..14: note = Table B: HLA-DPA1*02:01-B1*13:01L
SDRELHLSWEVGKP

SEQ ID NO: 24332 - protein, 15 aa, Severe acute respiratory syndrome coronavirus 2
  REGION 1..15: note = Table B: HLA-DPA1*02:01-B1*13:01L
YFVLTSHTVMPLSAP

SEQ ID NO: 24333 - protein, 16 aa, Severe acute respiratory syndrome coronavirus 2
  REGION 1..16: note = Table B: HLA-DPA1*02:01-B1*13:01L HLA-DPA1*03:01-B1*105:01L HLA-DQA1*01:03-B1*06:01L
VDALCEKALKYLPIDK

SEQ ID NO: 24334 - protein, 11 aa, Severe acute respiratory syndrome coronavirus 2
  REGION 1..11: note = Table B: HLA-DPA1*02:01-B1*13:01L HLA-DQA1*01:03-B1*06:01L
KYLPIDKCSRI

SEQ ID NO: 24335 - protein, 13 aa, Severe acute respiratory syndrome coronavirus 2
  REGION 1..13: note = Table B: HLA-DPA1*02:01-B1*13:01L
VDTVSALVYDNKL

SEQ ID NO: 24336 - protein, 16 aa, Severe acute respiratory syndrome coronavirus 2
  REGION 1..16: note = Table B: HLA-DPA1*02:01-B1*13:01L
ALVYDNKLKAHKDKSA

SEQ ID NO: 24337 - protein, 15 aa, Severe acute respiratory syndrome coronavirus 2
  REGION 1..15: note = Table B: HLA-DPA1*02:01-B1*13:01L
VYDNKLKAHKDKSAQ

SEQ ID NO: 24338 - protein, 13 aa, Severe acute respiratory syndrome coronavirus 2
  REGION 1..13: note = Table B: HLA-DPA1*02:01-B1*13:01L
ITHDVSSAINRPQ

SEQ ID NO: 24339 - protein, 13 aa, Severe acute respiratory syndrome coronavirus 2
  REGION 1..13: note = Table B: HLA-DPA1*02:01-B1*13:01L
FNVAITRAKVGIL

SEQ ID NO: 24340 - protein, 16 aa, Severe acute respiratory syndrome coronavirus 2
  REGION 1..16: note = Table B: HLA-DPA1*02:01-B1*13:01L
GILCIMSDRDLYDKLQ

SEQ ID NO: 24341 - protein, 11 aa, Severe acute respiratory syndrome coronavirus 2
  REGION 1..11: note = Table B: HLA-DPA1*02:01-B1*13:01L HLA-DQA1*01:03-B1*06:01L
TLQAENVTGLF

SEQ ID NO: 24342 - protein, 18 aa, Severe acute respiratory syndrome coronavirus 2
  REGION 1..18: note = Table B: HLA-DPA1*02:01-B1*13:01L
YRRLISMMGFKMNYQVNG

SEQ ID NO: 24343 - protein, 16 aa, Severe acute respiratory syndrome coronavirus 2
  REGION 1..16: note = Table B: HLA-DPA1*02:01-B1*13:01L HLA-DPA1*01:03-B1*104:01L
TGVNLVAVPTGYVDTP

SEQ ID NO: 24344 - protein, 16 aa, Severe acute respiratory syndrome coronavirus 2
  REGION 1..16: note = Table B: HLA-DPA1*02:01-B1*13:01L
VQMLSDTLKNLSDRVV

SEQ ID NO: 24345 - protein, 14 aa, Severe acute respiratory syndrome coronavirus 2
  REGION 1..14: note = Table B: HLA-DPA1*02:01-B1*13:01L HLA-DRB1*15:03L
IDVQQWGFTGNLQS

SEQ ID NO: 24346 - protein, 16 aa, Severe acute respiratory syndrome coronavirus 2
  REGION 1..16: note = Table B: HLA-DPA1*02:01-B1*13:01L
GNLQSNHDLYCQVHGN

SEQ ID NO: 24347 - protein, 14 aa, Severe acute respiratory syndrome coronavirus 2
  REGION 1..14: note = Table B: HLA-DPA1*02:01-B1*13:01L
KFYDAQPCSDKAYK

SEQ ID NO: 24348 - protein, 14 aa, Severe acute respiratory syndrome coronavirus 2
  REGION 1..14: note = Table B: HLA-DPA1*02:01-B1*13:01L
LFWNCNVDRYPANS

SEQ ID NO: 24349 - protein, 13 aa, Severe acute respiratory syndrome coronavirus 2
  REGION 1..13: note = Table B: HLA-DPA1*02:01-B1*13:01L
VCRFDTRVLSNLN

SEQ ID NO: 24350 - protein, 15 aa, Severe acute respiratory syndrome coronavirus 2
  REGION 1..15: note = Table B: HLA-DPA1*02:01-B1*13:01L
TRVLSNLNLPGCDGG

SEQ ID NO: 24351 - protein, 14 aa, Severe acute respiratory syndrome coronavirus 2
  REGION 1..14: note = Table B: HLA-DPA1*02:01-B1*13:01L
SHGKQVVSDIDYVP

SEQ ID NO: 24352 - protein, 15 aa, Severe acute respiratory syndrome coronavirus 2
  REGION 1..15: note = Table B: HLA-DPA1*02:01-B1*13:01L HLA-DQA1*05:05-B1*03:01L
VPLKSATCITRCNLG

SEQ ID NO: 24353 - protein, 10 aa, Severe acute respiratory syndrome coronavirus 2
  REGION 1..10: note = Table B: HLA-DPA1*02:01-B1*13:01L
LYLDAYNMMI

SEQ ID NO: 24354 - protein, 10 aa, Severe acute respiratory syndrome coronavirus 2
  REGION 1..10: note = Table B: HLA-DPA1*02:01-B1*13:01L HLA-DQA1*01:03-B1*06:01L
GFSLWVYKQF

SEQ ID NO: 24355 - protein, 11 aa, Severe acute respiratory syndrome coronavirus 2
  REGION 1..11: note = Table B: HLA-DPA1*02:01-B1*13:01L HLA-DQA1*01:03-B1*06:01L
QFDTYNLWNTF

SEQ ID NO: 24356 - protein, 15 aa, Severe acute respiratory syndrome coronavirus 2
  REGION 1..15: note = Table B: HLA-DPA1*02:01-B1*13:01L HLA-DQA1*01:03-B1*06:01L
VPEVKILNNLGVDIA

SEQ ID NO: 24357 - protein, 14 aa, Severe acute respiratory syndrome coronavirus 2
  REGION 1..14: note = Table B: HLA-DPA1*02:01-B1*13:01L
KILNNLGVDIAANT

SEQ ID NO: 24358 - protein, 16 aa, Severe acute respiratory syndrome coronavirus 2
  REGION 1..16: note = Table B: HLA-DPA1*02:01-B1*13:01L
IGVCSMTDIAKKPTET

SEQ ID NO: 24359 - protein, 16 aa, Severe acute respiratory syndrome coronavirus 2
  REGION 1..16: note = Table B: HLA-DPA1*02:01-B1*13:01L
DGRVDGQVDLFRNARN

SEQ ID NO: 24360 - protein, 15 aa, Severe acute respiratory syndrome coronavirus 2
  REGION 1..15: note = Table B: HLA-DPA1*02:01-B1*13:01L
VGPKQASLNGVTLIG

SEQ ID NO: 24361 - protein, 13 aa, Severe acute respiratory syndrome coronavirus 2
  REGION 1..13: note = Table B: HLA-DPA1*02:01-B1*13:01L
FKPRSQMEIDFLE

SEQ ID NO: 24362 - protein, 10 aa, Severe acute respiratory syndrome coronavirus 2
  REGION 1..10: note = Table B: HLA-DPA1*02:01-B1*13:01L HLA-DQA1*01:03-B1*06:01L
DFLELAMDEF

SEQ ID NO: 24363 - protein, 13 aa, Severe acute respiratory syndrome coronavirus 2
  REGION 1..13: note = Table B: HLA-DPA1*02:01-B1*13:01L
KRFKESPFELEDF

SEQ ID NO: 24364 - protein, 14 aa, Severe acute respiratory syndrome coronavirus 2
  REGION 1..14: note = Table B: HLA-DPA1*02:01-B1*13:01L
RFKESPFELEDFIP

SEQ ID NO: 24365 - protein, 14 aa, Severe acute respiratory syndrome coronavirus 2
  REGION 1..14: note = Table B: HLA-DPA1*02:01-B1*13:01L HLA-DRB1*04:08L
IKSQDLSVVSKVVK

SEQ ID NO: 24366 - protein, 16 aa, Severe acute respiratory syndrome coronavirus 2
  REGION 1..16: note = Table B: HLA-DPA1*02:01-B1*13:01L HLA-DRB1*15:03L
QPGVAMPNLYKMQRML

SEQ ID NO: 24367 - protein, 16 aa, Severe acute respiratory syndrome coronavirus 2
  REGION 1..16: note = Table B: HLA-DPA1*02:01-B1*13:01L HLA-DRB1*15:03L
LYKMQRMLLEKCDLQN

SEQ ID NO: 24368 - protein, 14 aa, Severe acute respiratory syndrome coronavirus 2
  REGION 1..14: note = Table B: HLA-DPA1*02:01-B1*13:01L
TVHTANKWDLIISD

SEQ ID NO: 24369 - protein, 14 aa, Severe acute respiratory syndrome coronavirus 2
  REGION 1..14: note = Table B: HLA-DPA1*02:01-B1*13:01L
VHTANKWDLIISDM

SEQ ID NO: 24370 - protein, 14 aa, Severe acute respiratory syndrome coronavirus 2
  REGION 1..14: note = Table B: HLA-DPA1*02:01-B1*13:01L
YDPKTKNVTKENDS

SEQ ID NO: 24371 - protein, 13 aa, Severe acute respiratory syndrome coronavirus 2
  REGION 1..13: note = Table B: HLA-DPA1*02:01-B1*13:01L
NVTKENDSKEGFF

SEQ ID NO: 24372 - protein, 14 aa, Severe acute respiratory syndrome coronavirus 2
  REGION 1..14: note = Table B: HLA-DPA1*02:01-B1*13:01L
SKEGFFTYICGFIQ

SEQ ID NO: 24373 - protein, 14 aa, Severe acute respiratory syndrome coronavirus 2
  REGION 1..14: note = Table B: HLA-DPA1*02:01-B1*13:01L
ALGGSVAIKITEHS

SEQ ID NO: 24374 - protein, 13 aa, Severe acute respiratory syndrome coronavirus 2
  REGION 1..13: note = Table B: HLA-DPA1*02:01-B1*13:01L
AIKITEHSWNADL

SEQ ID NO: 24375 - protein, 12 aa, Severe acute respiratory syndrome coronavirus 2
  REGION 1..12: note = Table B: HLA-DPA1*02:01-B1*13:01L HLA-DPA1*03:01-B1*105:01L
KITEHSWNADLY

SEQ ID NO: 24376 - protein, 12 aa, Severe acute respiratory syndrome coronavirus 2
  REGION 1..12: note = Table B: HLA-DPA1*02:01-B1*13:01L HLA-DQA1*05:05-B1*03:01L
SLKEGQINDMIL

SEQ ID NO: 24377 - protein, 14 aa, Severe acute respiratory syndrome coronavirus 2
  REGION 1..14: note = Table B: HLA-DPA1*02:01-B1*13:01L HLA-DPA1*03:01-B1*105:01L HLA-DQA1*05:05-B1*03:01L HLA-DQA1*01:03-B1*06:01L
IIRENNRVVISSDV

SEQ ID NO: 24378 - protein, 14 aa, Severe acute respiratory syndrome coronavirus 2
  REGION 1..14: note = Table B: HLA-DPA1*02:01-B1*13:01L
IRENNRVVISSDVL

SEQ ID NO: 24379 - protein, 11 aa, Severe acute respiratory syndrome coronavirus 2
  REGION 1..11: note = Table B: HLA-DPA1*02:01-B1*13:01L HLA-DQA1*01:03-B1*06:01L
VFKNIDGYFKI

SEQ ID NO: 24380 - protein, 16 aa, Severe acute respiratory syndrome coronavirus 2
  REGION 1..16: note = Table B: HLA-DPA1*02:01-B1*13:01L
DSSSGWTAGAAAYYVG

SEQ ID NO: 24381 - protein, 16 aa, Severe acute respiratory syndrome coronavirus 2
  REGION 1..16: note = Table B: HLA-DPA1*02:01-B1*13:01L HLA-DQA1*05:05-B1*03:01L HLA-DQA1*02:01-B1*03:03L
DPLSETKCTLKSFTVE

SEQ ID NO: 24382 - protein, 13 aa, Severe acute respiratory syndrome coronavirus 2
  REGION 1..13: note = Table B: HLA-DPA1*02:01-B1*13:01L
VSPTKLNDLCFTN

SEQ ID NO: 24383 - protein, 10 aa, Severe acute respiratory syndrome coronavirus 2
  REGION 1..10: note = Table B: HLA-DPA1*02:01-B1*13:01L
CYFPLQSYGF

SEQ ID NO: 24384 - protein, 15 aa, Severe acute respiratory syndrome coronavirus 2
  REGION 1..15: note = Table B: HLA-DPA1*02:01-B1*13:01L HLA-DPA1*03:01-B1*105:01L HLA-DRB1*16:01L
TNLVKNKCVNFNFNG

SEQ ID NO: 24385 - protein, 13 aa, Severe acute respiratory syndrome coronavirus 2
  REGION 1..13: note = Table B: HLA-DPA1*02:01-B1*13:01L
RDIADTTDAVRDP

SEQ ID NO: 24386 - protein, 13 aa, Severe acute respiratory syndrome coronavirus 2
  REGION 1..13: note = Table B: HLA-DPA1*02:01-B1*13:01L
DTTDAVRDPQTLE

SEQ ID NO: 24387 - protein, 12 aa, Severe acute respiratory syndrome coronavirus 2
  REGION 1..12: note = Table B: HLA-DPA1*02:01-B1*13:01L
NRALTGIAVEQD

SEQ ID NO: 24388 - protein, 15 aa, Severe acute respiratory syndrome coronavirus 2
  REGION 1..15: note = Table B: HLA-DPA1*02:01-B1*13:01L
DPSKPSKRSFIEDLL

SEQ ID NO: 24389 - protein, 15 aa, Severe acute respiratory syndrome coronavirus 2
  REGION 1..15: note = Table B: HLA-DPA1*02:01-B1*13:01L
GAALQIPFAMQMAYR

SEQ ID NO: 24390 - protein, 10 aa, Severe acute respiratory syndrome coronavirus 2
  REGION 1..10: note = Table B: HLA-DPA1*02:01-B1*13:01L HLA-DQA1*01:03-B1*06:01L
PFAMQMAYRF

SEQ ID NO: 24391 - protein, 13 aa, Severe acute respiratory syndrome coronavirus 2
  REGION 1..13: note = Table B: HLA-DPA1*02:01-B1*13:01L
AYRFNGIGVTQNV

SEQ ID NO: 24392 - protein, 14 aa, Severe acute respiratory syndrome coronavirus 2
  REGION 1..14: note = Table B: HLA-DPA1*02:01-B1*13:01L
IGVTQNVLYENQKL

SEQ ID NO: 24393 - protein, 14 aa, Severe acute respiratory syndrome coronavirus 2
  REGION 1..14: note = Table B: HLA-DPA1*02:01-B1*13:01L
LNDILSRLDKVEAE

SEQ ID NO: 24394 - protein, 12 aa, Severe acute respiratory syndrome coronavirus 2
  REGION 1..12: note = Table B: HLA-DPA1*02:01-B1*13:01L
RLDKVEAEVQID

SEQ ID NO: 24395 - protein, 13 aa, Severe acute respiratory syndrome coronavirus 2
  REGION 1..13: note = Table B: HLA-DPA1*02:01-B1*13:01L
YVTQQLIRAAEIR

SEQ ID NO: 24396 - protein, 14 aa, Severe acute respiratory syndrome coronavirus 2
  REGION 1..14: note = Table B: HLA-DPA1*02:01-B1*13:01L
IRASANLAATKMSE

SEQ ID NO: 24397 - protein, 14 aa, Severe acute respiratory syndrome coronavirus 2
  REGION 1..14: note = Table B: HLA-DPA1*02:01-B1*13:01L
NIQKEIDRLNEVAK

SEQ ID NO: 24398 - protein, 10 aa, Severe acute respiratory syndrome coronavirus 2
  REGION 1..10: note = Table B: HLA-DPA1*02:01-B1*13:01L HLA-DQA1*01:03-B1*06:01L
KWPWYIWLGF

SEQ ID NO: 24399 - protein, 18 aa, Severe acute respiratory syndrome coronavirus 2
  REGION 1..18: note = Table B: HLA-DPA1*02:01-B1*13:01L
TIGTVTLKQGEIKDATPS

SEQ ID NO: 24400 - protein, 18 aa, Severe acute respiratory syndrome coronavirus 2
  REGION 1..18: note = Table B: HLA-DPA1*02:01-B1*13:01L
IGTVTLKQGEIKDATPSD

SEQ ID NO: 24401 - protein, 14 aa, Severe acute respiratory syndrome coronavirus 2
  REGION 1..14: note = Table B: HLA-DPA1*02:01-B1*13:01L
ASKIITLKKRWQLA

SEQ ID NO: 24402 - protein, 14 aa, Severe acute respiratory syndrome coronavirus 2
  REGION 1..14: note = Table B: HLA-DPA1*02:01-B1*13:01L
FVTVYSHLLLVAAG

SEQ ID NO: 24403 - protein, 10 aa, Severe acute respiratory syndrome coronavirus 2
  REGION 1..10: note = Table B: HLA-DPA1*02:01-B1*13:01L HLA-DQA1*01:03-B1*06:01L
LYDANYFLCW

SEQ ID NO: 24404 - protein, 16 aa, Severe acute respiratory syndrome coronavirus 2
  REGION 1..16: note = Table B: HLA-DPA1*02:01-B1*13:01L
YTEKWESGVKDCVVLH

SEQ ID NO: 24405 - protein, 10 aa, Severe acute respiratory syndrome coronavirus 2
  REGION 1..10: note = Table B: HLA-DPA1*02:01-B1*13:01L HLA-DQA1*01:03-B1*06:01L HLA-DRB1*15:03L
RFLYIIKLIF

SEQ ID NO: 24406 - protein, 10 aa, Severe acute respiratory syndrome coronavirus 2
  REGION 1..10: note = Table B: HLA-DPA1*02:01-B1*13:01L HLA-DQA1*01:03-B1*06:01L
LYIIKLIFLW

SEQ ID NO: 24407 - protein, 15 aa, Severe acute respiratory syndrome coronavirus 2
  REGION 1..15: note = Table B: HLA-DPA1*02:01-B1*13:01L
LFARTRSMWSFNPET

SEQ ID NO: 24408 - protein, 17 aa, Severe acute respiratory syndrome coronavirus 2
  REGION 1..17: note = Table B: HLA-DPA1*02:01-B1*13:01L
IAGHHLGRCDIKDLPKE

SEQ ID NO: 24409 - protein, 15 aa, Severe acute respiratory syndrome coronavirus 2
  REGION 1..15: note = Table B: HLA-DPA1*02:01-B1*13:01L HLA-DRB1*04:08L
IKDLPKEITVATSRT

SEQ ID NO: 24410 - protein, 15 aa, Severe acute respiratory syndrome coronavirus 2
  REGION 1..15: note = Table B: HLA-DPA1*02:01-B1*13:01L
ATSRTLSYYKLGASQ

SEQ ID NO: 24411 - protein, 14 aa, Severe acute respiratory syndrome coronavirus 2
  REGION 1..14: note = Table B: HLA-DPA1*02:01-B1*13:01L
RTLSYYKLGASQRV

SEQ ID NO: 24412 - protein, 16 aa, Severe acute respiratory syndrome coronavirus 2
  REGION 1..16: note = Table B: HLA-DPA1*02:01-B1*13:01L
TQFAFACPDGVKHVYQ

SEQ ID NO: 24413 - protein, 16 aa, Severe acute respiratory syndrome coronavirus 2
  REGION 1..16: note = Table B: HLA-DPA1*02:01-B1*13:01L
YQLRARSVSPKLFIRQ

SEQ ID NO: 24414 - protein, 16 aa, Severe acute respiratory syndrome coronavirus 2
  REGION 1..16: note = Table B: HLA-DPA1*02:01-B1*13:01L
LRARSVSPKLFIRQEE

SEQ ID NO: 24415 - protein, 15 aa, Severe acute respiratory syndrome coronavirus 2
  REGION 1..15: note = Table B: HLA-DPA1*02:01-B1*13:01L HLA-DRB1*15:03L
GSLVVRCSFYEDFLE

SEQ ID NO: 24416 - protein, 14 aa, Severe acute respiratory syndrome coronavirus 2
  REGION 1..14: note = Table B: HLA-DPA1*02:01-B1*13:01L
VVRCSFYEDFLEYH

SEQ ID NO: 24417 - protein, 18 aa, Severe acute respiratory syndrome coronavirus 2
  REGION 1..18: note = Table B: HLA-DPA1*02:01-B1*13:01L
FPRGQGVPINTNSSPDDQ

SEQ ID NO: 24418 - protein, 13 aa, Severe acute respiratory syndrome coronavirus 2
  REGION 1..13: note = Table B: HLA-DPA1*02:01-B1*13:01L
GDGKMKDLSPRWY

SEQ ID NO: 24419 - protein, 11 aa, Severe acute respiratory syndrome coronavirus 2
  REGION 1..11: note = Table B: HLA-DPA1*02:01-B1*13:01L HLA-DQA1*01:03-B1*06:01L HLA-DQA1*02:01-B1*03:03L
PYGANKDGIIW

SEQ ID NO: 24420 - protein, 14 aa, Severe acute respiratory syndrome coronavirus 2
  REGION 1..14: note = Table B: HLA-DPA1*02:01-B1*13:01L HLA-DPA1*01:03-B1*104:01L HLA-DPA1*01:02-B1*04:01L
NKDGIIWVATEGAL

SEQ ID NO: 24421 - protein, 14 aa, Severe acute respiratory syndrome coronavirus 2
  REGION 1..14: note = Table B: HLA-DPA1*02:01-B1*13:01L HLA-DPA1*01:03-B1*104:01L
IWVATEGALNTPKD

SEQ ID NO: 24422 - protein, 14 aa, Severe acute respiratory syndrome coronavirus 2
  REGION 1..14: note = Table B: HLA-DPA1*02:01-B1*13:01L HLA-DRB1*07:01L
IVLQLPQGTTLPKG

SEQ ID NO: 24423 - protein, 19 aa, Severe acute respiratory syndrome coronavirus 2
  REGION 1..19: note = Table B: HLA-DPA1*02:01-B1*13:01L
PGSSRGTSPARMAGNGGDA

SEQ ID NO: 24424 - protein, 15 aa, Severe acute respiratory syndrome coronavirus 2
  REGION 1..15: note = Table B: HLA-DPA1*02:01-B1*13:01L
DQELIRQGTDYKHWP

SEQ ID NO: 24425 - protein, 14 aa, Severe acute respiratory syndrome coronavirus 2
  REGION 1..14: note = Table B: HLA-DPA1*02:01-B1*13:01L HLA-DPA1*03:01-B1*105:01L HLA-DQA1*01:03-B1*06:01L
IRQGTDYKHWPQIA

SEQ ID NO: 24426 - protein, 13 aa, Severe acute respiratory syndrome coronavirus 2
  REGION 1..13: note = Table B: HLA-DPA1*02:01-B1*13:01L HLA-DRB1*16:01L HLA-DQA1*01:03-B1*06:01L
DDKDPNFKDQVIL

SEQ ID NO: 24427 - protein, 16 aa, Severe acute respiratory syndrome coronavirus 2
  REGION 1..16: note = Table B: HLA-DPA1*02:01-B1*13:01L
KKKKADETQALPQRQK

SEQ ID NO: 24428 - protein, 11 aa, Severe acute respiratory syndrome coronavirus 2
  REGION 1..11: note = Table B: HLA-DPA1*02:01-B1*13:01L HLA-DQA1*01:03-B1*06:01L HLA-DQA1*02:01-B1*03:03L HLA-DRB1*15:03L
TLLPAADLDDF

SEQ ID NO: 24429 - protein, 10 aa, Severe acute respiratory syndrome coronavirus 2
  REGION 1..10: note = Table B: HLA-DPA1*02:01-B1*13:01L
INVFAFPFTI

SEQ ID NO: 24430 - protein, 15 aa, Severe acute respiratory syndrome coronavirus 2
  REGION 1..15: note = Table B: HLA-DPA1*03:01-B1*105:01L
VPGFNEKTHVQLSLP

SEQ ID NO: 24431 - protein, 13 aa, Severe acute respiratory syndrome coronavirus 2
  REGION 1..13: note = Table B: HLA-DPA1*03:01-B1*105:01L
VMVELVAELEGIQ

SEQ ID NO: 24432 - protein, 15 aa, Severe acute respiratory syndrome coronavirus 2
  REGION 1..15: note = Table B: HLA-DPA1*03:01-B1*105:01L
ENWNTKHSSGVTREL

SEQ ID NO: 24433 - protein, 15 aa, Severe acute respiratory syndrome coronavirus 2
  REGION 1..15: note = Table B: HLA-DPA1*03:01-B1*105:01L
TRYVDNNFCGPDGYP

SEQ ID NO: 24434 - protein, 13 aa, Severe acute respiratory syndrome coronavirus 2
  REGION 1..13: note = Table B: HLA-DPA1*03:01-B1*105:01L HLA-DQA1*05:05-B1*03:01L HLA-DQA1*02:01-B1*03:03L
AGKASCTLSEQLD

SEQ ID NO: 24435 - protein, 15 aa, Severe acute respiratory syndrome coronavirus 2
  REGION 1..15: note = Table B: HLA-DPA1*03:01-B1*105:01L HLA-DQA1*01:03-B1*06:01L
SPNECNQMCLSTLMK

SEQ ID NO: 24436 - protein, 13 aa, Severe acute respiratory syndrome coronavirus 2
  REGION 1..13: note = Table B: HLA-DPA1*03:01-B1*105:01L HLA-DQA1*05:05-B1*03:01L HLA-DQA1*02:01-B1*03:03L
KEGATTCGYLPQN

SEQ ID NO: 24437 - protein, 15 aa, Severe acute respiratory syndrome coronavirus 2
  REGION 1..15: note = Table B: HLA-DPA1*03:01-B1*105:01L HLA-DQA1*05:05-B1*03:01L
EGATTCGYLPQNAVV

SEQ ID NO: 24438 - protein, 15 aa, Severe acute respiratory syndrome coronavirus 2
  REGION 1..15: note = Table B: HLA-DPA1*03:01-B1*105:01L
NAVVKIYCPACHNSE

SEQ ID NO: 24439 - protein, 14 aa, Severe acute respiratory syndrome coronavirus 2
  REGION 1..14: note = Table B: HLA-DPA1*03:01-B1*105:01L
GRTIAFGGCVFSYV

SEQ ID NO: 24440 - protein, 13 aa, Severe acute respiratory syndrome coronavirus 2
  REGION 1..13: note = Table B: HLA-DPA1*03:01-B1*105:01L HLA-DQA1*01:03-B1*06:01L
SEGLNDNLLEILQ

SEQ ID NO: 24441 - protein, 12 aa, Severe acute respiratory syndrome coronavirus 2
  REGION 1..12: note = Table B: HLA-DPA1*03:01-B1*105:01L
GLNDNLLEILQK

SEQ ID NO: 24442 - protein, 10 aa, Severe acute respiratory syndrome coronavirus 2
  REGION 1..10: note = Table B: HLA-DPA1*03:01-B1*105:01L
EILQKEKVNI

SEQ ID NO: 24443 - protein, 15 aa, Severe acute respiratory syndrome coronavirus 2
  REGION 1..15: note = Table B: HLA-DPA1*03:01-B1*105:01L
YKAFKQIVESCGNFK

SEQ ID NO: 24444 - protein, 13 aa, Severe acute respiratory syndrome coronavirus 2
  REGION 1..13: note = Table B: HLA-DPA1*03:01-B1*105:01L HLA-DQA1*02:01-B1*03:03L
IVESCGNFKVTKG

SEQ ID NO: 24445 - protein, 13 aa, Severe acute respiratory syndrome coronavirus 2
  REGION 1..13: note = Table B: HLA-DPA1*03:01-B1*105:01L
QKAAITILDGISQ

SEQ ID NO: 24446 - protein, 13 aa, Severe acute respiratory syndrome coronavirus 2
  REGION 1..13: note = Table B: HLA-DPA1*03:01-B1*105:01L
TNNLVVMAYITGG

SEQ ID NO: 24447 - protein, 14 aa, Severe acute respiratory syndrome coronavirus 2
  REGION 1..14: note = Table B: HLA-DPA1*03:01-B1*105:01L HLA-DQA1*05:05-B1*03:01L HLA-DQA1*01:03-B1*06:01L
NNLVVMAYITGGVV

SEQ ID NO: 24448 - protein, 12 aa, Severe acute respiratory syndrome coronavirus 2
  REGION 1..12: note = Table B: HLA-DPA1*03:01-B1*105:01L
VQLTSQWLTNIF

SEQ ID NO: 24449 - protein, 11 aa, Severe acute respiratory syndrome coronavirus 2
  REGION 1..11: note = Table B: HLA-DPA1*03:01-B1*105:01L
LTSQWLTNIFG

SEQ ID NO: 24450 - protein, 13 aa, Severe acute respiratory syndrome coronavirus 2
  REGION 1..13: note = Table B: HLA-DPA1*03:01-B1*105:01L
WEIVKFISTCACE

SEQ ID NO: 24451 - protein, 14 aa, Severe acute respiratory syndrome coronavirus 2
  REGION 1..14: note = Table B: HLA-DPA1*03:01-B1*105:01L HLA-DQA1*05:05-B1*03:01L
LALCADSIIIGGAK

SEQ ID NO: 24452 - protein, 13 aa, Severe acute respiratory syndrome coronavirus 2
  REGION 1..13: note = Table B: HLA-DPA1*03:01-B1*105:01L
GAKLKALNLGETF

SEQ ID NO: 24453 - protein, 11 aa, Severe acute respiratory syndrome coronavirus 2
  REGION 1..11: note = Table B: HLA-DPA1*03:01-B1*105:01L HLA-DPA1*01:02-B1*04:01L HLA-DQA1*01:03-B1*06:01L
DTEKYCALAPN

SEQ ID NO: 24454 - protein, 14 aa, Severe acute respiratory syndrome coronavirus 2
  REGION 1..14: note = Table B: HLA-DPA1*03:01-B1*105:01L
MVTNNTFTLKGGAP

SEQ ID NO: 24455 - protein, 12 aa, Severe acute respiratory syndrome coronavirus 2
  REGION 1..12: note = Table B: HLA-DPA1*03:01-B1*105:01L
FTLKGGAPTKVT

SEQ ID NO: 24456 - protein, 14 aa, Severe acute respiratory syndrome coronavirus 2
  REGION 1..14: note = Table B: HLA-DPA1*03:01-B1*105:01L
VLNEKCSAYTVELG

SEQ ID NO: 24457 - protein, 11 aa, Severe acute respiratory syndrome coronavirus 2
  REGION 1..11: note = Table B: HLA-DPA1*03:01-B1*105:01L HLA-DQA1*01:03-B1*06:01L
TVELGTEVNEF

SEQ ID NO: 24458 - protein, 14 aa, Severe acute respiratory syndrome coronavirus 2
  REGION 1..14: note = Table B: HLA-DPA1*03:01-B1*105:01L
LGTEVNEFACVVAD

SEQ ID NO: 24459 - protein, 12 aa, Severe acute respiratory syndrome coronavirus 2
  REGION 1..12: note = Table B: HLA-DPA1*03:01-B1*105:01L
VNEFACVVADAV

SEQ ID NO: 24460 - protein, 11 aa, Severe acute respiratory syndrome coronavirus 2
  REGION 1..11: note = Table B: HLA-DPA1*03:01-B1*105:01L HLA-DRB1*15:03L
IDLDEWSMATY

SEQ ID NO: 24461 - protein, 14 aa, Severe acute respiratory syndrome coronavirus 2
  REGION 1..14: note = Table B: HLA-DPA1*03:01-B1*105:01L
EWSMATYYLFDESG

SEQ ID NO: 24462 - protein, 14 aa, Severe acute respiratory syndrome coronavirus 2
  REGION 1..14: note = Table B: HLA-DPA1*03:01-B1*105:01L
KLASHMYCSFYPPD

SEQ ID NO: 24463 - protein, 14 aa, Severe acute respiratory syndrome coronavirus 2
  REGION 1..14: note = Table B: HLA-DPA1*03:01-B1*105:01L
LASHMYCSFYPPDE

SEQ ID NO: 24464 - protein, 14 aa, Severe acute respiratory syndrome coronavirus 2
  REGION 1..14: note = Table B: HLA-DPA1*03:01-B1*105:01L
ASHMYCSFYPPDED

SEQ ID NO: 24465 - protein, 14 aa, Severe acute respiratory syndrome coronavirus 2
  REGION 1..14: note = Table B: HLA-DPA1*03:01-B1*105:01L HLA-DQA1*01:03-B1*06:01L
SHMYCSFYPPDEDE

SEQ ID NO: 24466 - protein, 15 aa, Severe acute respiratory syndrome coronavirus 2
  REGION 1..15: note = Table B: HLA-DPA1*03:01-B1*105:01L HLA-DQA1*01:03-B1*06:01L
EEGDCEEEEFEPSTQ

SEQ ID NO: 24467 - protein, 15 aa, Severe acute respiratory syndrome coronavirus 2
  REGION 1..15: note = Table B: HLA-DPA1*03:01-B1*105:01L
EGDCEEEEFEPSTQY

SEQ ID NO: 24468 - protein, 14 aa, Severe acute respiratory syndrome coronavirus 2
  REGION 1..14: note = Table B: HLA-DPA1*03:01-B1*105:01L HLA-DQA1*01:03-B1*06:01L
DCEEEEFEPSTQYE

SEQ ID NO: 24469 - protein, 17 aa, Severe acute respiratory syndrome coronavirus 2
  REGION 1..17: note = Table B: HLA-DPA1*03:01-B1*105:01L HLA-DRB1*15:03L
QPEEEQEEDWLDDDSQQ

SEQ ID NO: 24470 - protein, 15 aa, Severe acute respiratory syndrome coronavirus 2
  REGION 1..15: note = Table B: HLA-DPA1*03:01-B1*105:01L HLA-DRB1*16:01L HLA-DRB1*04:08L
DDSQQTVGQQDGSED

SEQ ID NO: 24471 - protein, 14 aa, Severe acute respiratory syndrome coronavirus 2
  REGION 1..14: note = Table B: HLA-DPA1*03:01-B1*105:01L HLA-DQA1*05:05-B1*03:01L
QTTTIQTIVEVQPQ

SEQ ID NO: 24472 - protein, 12 aa, Severe acute respiratory syndrome coronavirus 2
  REGION 1..12: note = Table B: HLA-DPA1*03:01-B1*105:01L HLA-DQA1*05:05-B1*03:01L
EMELTPVVQTIE

SEQ ID NO: 24473 - protein, 10 aa, Severe acute respiratory syndrome coronavirus 2
  REGION 1..10: note = Table B: HLA-DPA1*03:01-B1*105:01L HLA-DQA1*03:01-B1*03:02L HLA-DPA1*01:02-B1*04:01L HLA-DQA1*01:03-B1*06:01L HLA-DQA1*02:01-B1*03:03L
FSGYLKLTDN

SEQ ID NO: 24474 - protein, 16 aa, Severe acute respiratory syndrome coronavirus 2
  REGION 1..16: note = Table B: HLA-DPA1*03:01-B1*105:01L
DIVEEAKKVKPTVVVN

SEQ ID NO: 24475 - protein, 14 aa, Severe acute respiratory syndrome coronavirus 2
  REGION 1..14: note = Table B: HLA-DPA1*03:01-B1*105:01L
NKATNNAMQVESDD

SEQ ID NO: 24476 - protein, 14 aa, Severe acute respiratory syndrome coronavirus 2
  REGION 1..14: note = Table B: HLA-DPA1*03:01-B1*105:01L
MQVESDDYIATNGP

SEQ ID NO: 24477 - protein, 10 aa, Severe acute respiratory syndrome coronavirus 2
  REGION 1..10: note = Table B: HLA-DPA1*03:01-B1*105:01L HLA-DPA1*01:02-B1*04:01L
LLKSAYENFN

SEQ ID NO: 24478 - protein, 13 aa, Severe acute respiratory syndrome coronavirus 2
  REGION 1..13: note = Table B: HLA-DPA1*03:01-B1*105:01L
DTVRTNVYLAVFD

SEQ ID NO: 24479 - protein, 10 aa, Severe acute respiratory syndrome coronavirus 2
  REGION 1..10: note = Table B: HLA-DPA1*03:01-B1*105:01L HLA-DQA1*03:01-B1*03:02L HLA-DPA1*01:02-B1*04:01L
KLVSSFLEMK

SEQ ID NO: 24480 - protein, 14 aa, Severe acute respiratory syndrome coronavirus 2
  REGION 1..14: note = Table B: HLA-DPA1*03:01-B1*105:01L
KIKACVEEVTTTLE

SEQ ID NO: 24481 - protein, 12 aa, Severe acute respiratory syndrome coronavirus 2
  REGION 1..12: note = Table B: HLA-DPA1*03:01-B1*105:01L HLA-DRB1*15:03L
LLYIDINGNLHP

SEQ ID NO: 24482 - protein, 14 aa, Severe acute respiratory syndrome coronavirus 2
  REGION 1..14: note = Table B: HLA-DPA1*03:01-B1*105:01L HLA-DRB1*16:01L
VSDIDITFLKKDAP

SEQ ID NO: 24483 - protein, 18 aa, Severe acute respiratory syndrome coronavirus 2
  REGION 1..18: note = Table B: HLA-DPA1*03:01-B1*105:01L
EETRKLMPVCVETKAIVS

SEQ ID NO: 24484 - protein, 15 aa, Severe acute respiratory syndrome coronavirus 2
  REGION 1..15: note = Table B: HLA-DPA1*03:01-B1*105:01L
MPVCVETKAIVSTIQ

SEQ ID NO: 24485 - protein, 12 aa, Severe acute respiratory syndrome coronavirus 2
  REGION 1..12: note = Table B: HLA-DPA1*03:01-B1*105:01L
KYKGIKIQEGVV

SEQ ID NO: 24486 - protein, 12 aa, Severe acute respiratory syndrome coronavirus 2
  REGION 1..12: note = Table B: HLA-DPA1*03:01-B1*105:01L
TLVTMPLGYVTH

SEQ ID NO: 24487 - protein, 13 aa, Severe acute respiratory syndrome coronavirus 2
  REGION 1..13: note = Table B: HLA-DPA1*03:01-B1*105:01L
TFDNLKTLLSLRE

SEQ ID NO: 24488 - protein, 16 aa, Severe acute respiratory syndrome coronavirus 2
  REGION 1..16: note = Table B: HLA-DPA1*03:01-B1*105:01L
LLSLREVRTIKVFTTV

SEQ ID NO: 24489 - protein, 11 aa, Severe acute respiratory syndrome coronavirus 2
  REGION 1..11: note = Table B: HLA-DPA1*03:01-B1*105:01L HLA-DRB1*15:03L
TVDNINLHTQV

SEQ ID NO: 24490 - protein, 14 aa, Severe acute respiratory syndrome coronavirus 2
  REGION 1..14: note = Table B: HLA-DPA1*03:01-B1*105:01L HLA-DQA1*05:05-B1*03:01L HLA-DQA1*01:03-B1*06:01L
IKWADNNCYLATAL

SEQ ID NO: 24491 - protein, 11 aa, Severe acute respiratory syndrome coronavirus 2
  REGION 1..11: note = Table B: HLA-DPA1*03:01-B1*105:01L
VGELGDVRETM

SEQ ID NO: 24492 - protein, 10 aa, Severe acute respiratory syndrome coronavirus 2
  REGION 1..10: note = Table B: HLA-DPA1*03:01-B1*105:01L HLA-DPA1*01:02-B1*04:01L HLA-DQA1*01:03-B1*06:01L
FQHANLDSCK

SEQ ID NO: 24493 - protein, 10 aa, Severe acute respiratory syndrome coronavirus 2
  REGION 1..10: note = Table B: HLA-DPA1*03:01-B1*105:01L HLA-DPA1*01:02-B1*04:01L HLA-DQA1*01:03-B1*06:01L HLA-DQA1*02:01-B1*03:03L
MGTLSYEQFK

SEQ ID NO: 24494 - protein, 15 aa, Severe acute respiratory syndrome coronavirus 2
  REGION 1..15: note = Table B: HLA-DPA1*03:01-B1*105:01L
ELKHGTFTCASEYTG

SEQ ID NO: 24495 - protein, 13 aa, Severe acute respiratory syndrome coronavirus 2
  REGION 1..13: note = Table B: HLA-DPA1*03:01-B1*105:01L HLA-DQA1*05:05-B1*03:01L
TFTCASEYTGNYQ

SEQ ID NO: 24496 - protein, 12 aa, Severe acute respiratory syndrome coronavirus 2
  REGION 1..12: note = Table B: HLA-DPA1*03:01-B1*105:01L
ASFDNFKFVCDN

SEQ ID NO: 24497 - protein, 17 aa, Severe acute respiratory syndrome coronavirus 2
  REGION 1..17: note = Table B: HLA-DPA1*03:01-B1*105:01L
KPNTWCIRCLWSTKPVE

SEQ ID NO: 24498 - protein, 15 aa, Severe acute respiratory syndrome coronavirus 2
  REGION 1..15: note = Table B: HLA-DPA1*03:01-B1*105:01L HLA-DQA1*03:01-B1*03:02L HLA-DQA1*05:05-B1*03:01L HLA-DQA1*01:03-B1*06:01L HLA-DQA1*02:01-B1*03:03L
DAQGMDNLACEDLKP

SEQ ID NO: 24499 - protein, 10 aa, Severe acute respiratory syndrome coronavirus 2
  REGION 1..10: note = Table B: HLA-DPA1*03:01-B1*105:01L HLA-DPA1*01:02-B1*04:01L HLA-DQA1*01:03-B1*06:01L
LACEDLKPVS

SEQ ID NO: 24500 - protein, 12 aa, Severe acute respiratory syndrome coronavirus 2
  REGION 1..12: note = Table B: HLA-DPA1*03:01-B1*105:01L
GHTDLMAAYVDN

SEQ ID NO: 24501 - protein, 12 aa, Severe acute respiratory syndrome coronavirus 2
  REGION 1..12: note = Table B: HLA-DPA1*03:01-B1*105:01L
LLQLCTFTRSTN

SEQ ID NO: 24502 - protein, 13 aa, Severe acute respiratory syndrome coronavirus 2
  REGION 1..13: note = Table B: HLA-DPA1*03:01-B1*105:01L HLA-DQA1*01:03-B1*06:01L
MPSYCTGYREGYL

SEQ ID NO: 24503 - protein, 11 aa, Severe acute respiratory syndrome coronavirus 2
  REGION 1..11: note = Table B: HLA-DPA1*03:01-B1*105:01L HLA-DQA1*03:01-B1*03:02L HLA-DPA1*01:02-B1*04:01L HLA-DQA1*01:03-B1*06:01L HLA-DQA1*02:01-B1*03:03L
GYREGYLNSTN

SEQ ID NO: 24504 - protein, 14 aa, Severe acute respiratory syndrome coronavirus 2
  REGION 1..14: note = Table B: HLA-DPA1*03:01-B1*105:01L
TYPSLETIQITISS

SEQ ID NO: 24505 - protein, 13 aa, Severe acute respiratory syndrome coronavirus 2
  REGION 1..13: note = Table B: HLA-DPA1*03:01-B1*105:01L
RFFYVLGLAAIMQ

SEQ ID NO: 24506 - protein, 10 aa, Severe acute respiratory syndrome coronavirus 2
  REGION 1..10: note = Table B: HLA-DPA1*03:01-B1*105:01L HLA-DPA1*01:02-B1*04:01L
FFASFYYVWK

SEQ ID NO: 24507 - protein, 10 aa, Severe acute respiratory syndrome coronavirus 2
  REGION 1..10: note = Table B: HLA-DPA1*03:01-B1*105:01L HLA-DQA1*03:01-B1*03:02L HLA-DQA1*05:05-B1*03:01L HLA-DQA1*01:03-B1*06:01L HLA-DQA1*02:01-B1*03:03L
VLSTFISAAR

SEQ ID NO: 24508 - protein, 14 aa, Severe acute respiratory syndrome coronavirus 2
  REGION 1..14: note = Table B: HLA-DPA1*03:01-B1*105:01L
DVETKDVVECLKLS

SEQ ID NO: 24509 - protein, 12 aa, Severe acute respiratory syndrome coronavirus 2
  REGION 1..12: note = Table B: HLA-DPA1*03:01-B1*105:01L
MLTYNKVENMTP

SEQ ID NO: 24510 - protein, 12 aa, Severe acute respiratory syndrome coronavirus 2
  REGION 1..12: note = Table B: HLA-DPA1*03:01-B1*105:01L HLA-DQA1*05:05-B1*03:01L
VLAAECTIFKDA

SEQ ID NO: 24511 - protein, 12 aa, Severe acute respiratory syndrome coronavirus 2
  REGION 1..12: note = Table B: HLA-DPA1*03:01-B1*105:01L HLA-DQA1*03:01-B1*03:02L HLA-DQA1*05:05-B1*03:01L HLA-DQA1*02:01-B1*03:03L
AAECTIFKDASG

SEQ ID NO: 24512 - protein, 11 aa, Severe acute respiratory syndrome coronavirus 2
  REGION 1..11: note = Table B: HLA-DPA1*03:01-B1*105:01L HLA-DQA1*05:05-B1*03:01L HLA-DQA1*01:03-B1*06:01L
FKDASGKPVPY

SEQ ID NO: 24513 - protein, 14 aa, Severe acute respiratory syndrome coronavirus 2
  REGION 1..14: note = Table B: HLA-DPA1*03:01-B1*105:01L HLA-DQA1*05:05-B1*03:01L
PYCYDTNVLEGSVA

SEQ ID NO: 24514 - protein, 12 aa, Severe acute respiratory syndrome coronavirus 2
  REGION 1..12: note = Table B: HLA-DPA1*03:01-B1*105:01L HLA-DRB1*04:08L
VLEGSVAYESLR

SEQ ID NO: 24515 - protein, 12 aa, Severe acute respiratory syndrome coronavirus 2
  REGION 1..12: note = Table B: HLA-DPA1*03:01-B1*105:01L
LEGSVAYESLRP

SEQ ID NO: 24516 - protein, 12 aa, Severe acute respiratory syndrome coronavirus 2
  REGION 1..12: note = Table B: HLA-DPA1*03:01-B1*105:01L HLA-DQA1*05:05-B1*03:01L
STSGRWVLNNDY

SEQ ID NO: 24517 - protein, 15 aa, Severe acute respiratory syndrome coronavirus 2
  REGION 1..15: note = Table B: HLA-DPA1*03:01-B1*105:01L
PGVFCGVDAVNLLTN

SEQ ID NO: 24518 - protein, 15 aa, Severe acute respiratory syndrome coronavirus 2
  REGION 1..15: note = Table B: HLA-DPA1*03:01-B1*105:01L
LAYYFMRFRRAFGEY

SEQ ID NO: 24519 - protein, 16 aa, Severe acute respiratory syndrome coronavirus 2
  REGION 1..16: note = Table B: HLA-DPA1*03:01-B1*105:01L
FMRFRRAFGEYSHVVA

SEQ ID NO: 24520 - protein, 12 aa, Severe acute respiratory syndrome coronavirus 2
  REGION 1..12: note = Table B: HLA-DPA1*03:01-B1*105:01L
AFGEYSHVVAFN

SEQ ID NO: 24521 - protein, 12 aa, Severe acute respiratory syndrome coronavirus 2
  REGION 1..12: note = Table B: HLA-DPA1*03:01-B1*105:01L
MSFTVLCLTPVY

SEQ ID NO: 24522 - protein, 15 aa, Severe acute respiratory syndrome coronavirus 2
  REGION 1..15: note = Table B: HLA-DPA1*03:01-B1*105:01L
VIYLYLTFYLTNDVS

SEQ ID NO: 24523 - protein, 10 aa, Severe acute respiratory syndrome coronavirus 2
  REGION 1..10: note = Table B: HLA-DPA1*03:01-B1*105:01L HLA-DPA1*01:02-B1*04:01L
FNGVSFSTFE

SEQ ID NO: 24524 - protein, 13 aa, Severe acute respiratory syndrome coronavirus 2
  REGION 1..13: note = Table B: HLA-DPA1*03:01-B1*105:01L
FEEAALCTFLLNK

SEQ ID NO: 24525 - protein, 11 aa, Severe acute respiratory syndrome coronavirus 2
  REGION 1..11: note = Table B: HLA-DPA1*03:01-B1*105:01L
TFLLNKEMYLK

SEQ ID NO: 24526 - protein, 11 aa, Severe acute respiratory syndrome coronavirus 2
  REGION 1..11: note = Table B: HLA-DPA1*03:01-B1*105:01L
FLLNKEMYLKL

SEQ ID NO: 24527 - protein, 10 aa, Severe acute respiratory syndrome coronavirus 2
  REGION 1..10: note = Table B: HLA-DPA1*03:01-B1*105:01L HLA-DPA1*01:02-B1*04:01L HLA-DRB1*16:01L
LNKEMYLKLR

SEQ ID NO: 24528 - protein, 10 aa, Severe acute respiratory syndrome coronavirus 2
  REGION 1..10: note = Table B: HLA-DPA1*03:01-B1*105:01L HLA-DPA1*01:02-B1*04:01L
LRSDVLLPLT

SEQ ID NO: 24529 - protein, 12 aa, Severe acute respiratory syndrome coronavirus 2
  REGION 1..12: note = Table B: HLA-DPA1*03:01-B1*105:01L HLA-DQA1*03:01-B1*03:02L HLA-DQA1*01:03-B1*06:01L
RSDVLLPLTQYN

SEQ ID NO: 24530 - protein, 14 aa, Severe acute respiratory syndrome coronavirus 2
  REGION 1..14: note = Table B: HLA-DPA1*03:01-B1*105:01L
SYREAACCHLAKAL

SEQ ID NO: 24531 - protein, 14 aa, Severe acute respiratory syndrome coronavirus 2
  REGION 1..14: note = Table B: HLA-DPA1*03:01-B1*105:01L HLA-DQA1*05:05-B1*03:01L HLA-DQA1*02:01-B1*03:03L
YREAACCHLAKALN

SEQ ID NO: 24532 - protein, 14 aa, Severe acute respiratory syndrome coronavirus 2
  REGION 1..14: note = Table B: HLA-DPA1*03:01-B1*105:01L
FPSGKVEGCMVQVT

SEQ ID NO: 24533 - protein, 15 aa, Severe acute respiratory syndrome coronavirus 2
  REGION 1..15: note = Table B: HLA-DPA1*03:01-B1*105:01L
GKVEGCMVQVTCGTT

SEQ ID NO: 24534 - protein, 13 aa, Severe acute respiratory syndrome coronavirus 2
  REGION 1..13: note = Table B: HLA-DPA1*03:01-B1*105:01L HLA-DRB1*15:03L
TTLNGLWLDDVVY

SEQ ID NO: 24535 - protein, 11 aa, Severe acute respiratory syndrome coronavirus 2
  REGION 1..11: note = Table B: HLA-DPA1*03:01-B1*105:01L HLA-DPA1*01:02-B1*04:01L
LWLDDVVYCPR

SEQ ID NO: 24536 - protein, 15 aa, Severe acute respiratory syndrome coronavirus 2
  REGION 1..15: note = Table B: HLA-DPA1*03:01-B1*105:01L
HVICTSEDMLNPNYE

SEQ ID NO: 24537 - protein, 13 aa, Severe acute respiratory syndrome coronavirus 2
  REGION 1..13: note = Table B: HLA-DPA1*03:01-B1*105:01L
LNPNYEDLLIRKS

SEQ ID NO: 24538 - protein, 15 aa, Severe acute respiratory syndrome coronavirus 2
  REGION 1..15: note = Table B: HLA-DPA1*03:01-B1*105:01L
IQPGQTFSVLACYNG

SEQ ID NO: 24539 - protein, 13 aa, Severe acute respiratory syndrome coronavirus 2
  REGION 1..13: note = Table B: HLA-DPA1*03:01-B1*105:01L
LACYNGSPSGVYQ

SEQ ID NO: 24540 - protein, 11 aa, Severe acute respiratory syndrome coronavirus 2
  REGION 1..11: note = Table B: HLA-DPA1*03:01-B1*105:01L HLA-DPA1*01:02-B1*04:01L
DYDCVSFCYMH

SEQ ID NO: 24541 - protein, 13 aa, Severe acute respiratory syndrome coronavirus 2
  REGION 1..13: note = Table B: HLA-DPA1*03:01-B1*105:01L
YDCVSFCYMHHME

SEQ ID NO: 24542 - protein, 13 aa, Severe acute respiratory syndrome coronavirus 2
  REGION 1..13: note = Table B: HLA-DPA1*03:01-B1*105:01L HLA-DQA1*01:03-B1*06:01L
AGTDLEGNFYGPF

SEQ ID NO: 24543 - protein, 14 aa, Severe acute respiratory syndrome coronavirus 2
  REGION 1..14: note = Table B: HLA-DPA1*03:01-B1*105:01L
RQTAQAAGTDTTIT

SEQ ID NO: 24544 - protein, 12 aa, Severe acute respiratory syndrome coronavirus 2
  REGION 1..12: note = Table B: HLA-DPA1*03:01-B1*105:01L
DFNLVAMKYNYE

SEQ ID NO: 24545 - protein, 14 aa, Severe acute respiratory syndrome coronavirus 2
  REGION 1..14: note = Table B: HLA-DPA1*03:01-B1*105:01L
DILGPLSAQTGIAV

SEQ ID NO: 24546 - protein, 12 aa, Severe acute respiratory syndrome coronavirus 2
  REGION 1..12: note = Table B: HLA-DPA1*03:01-B1*105:01L HLA-DQA1*01:03-B1*06:01L
GIAVLDMCASLK

SEQ ID NO: 24547 - protein, 12 aa, Severe acute respiratory syndrome coronavirus 2
  REGION 1..12: note = Table B: HLA-DPA1*03:01-B1*105:01L
GRTILGSALLED

SEQ ID NO: 24548 - protein, 11 aa, Severe acute respiratory syndrome coronavirus 2
  REGION 1..11: note = Table B: HLA-DPA1*03:01-B1*105:01L
TILGSALLEDE

SEQ ID NO: 24549 - protein, 14 aa, Severe acute respiratory syndrome coronavirus 2
  REGION 1..14: note = Table B: HLA-DPA1*03:01-B1*105:01L
VVRQCSGVTFQSAV

SEQ ID NO: 24550 - protein, 14 aa, Severe acute respiratory syndrome coronavirus 2
  REGION 1..14: note = Table B: HLA-DPA1*03:01-B1*105:01L
VRQCSGVTFQSAVK

SEQ ID NO: 24551 - protein, 13 aa, Severe acute respiratory syndrome coronavirus 2
  REGION 1..13: note = Table B: HLA-DPA1*03:01-B1*105:01L
GTHHWLLLTILTS

SEQ ID NO: 24552 - protein, 12 aa, Severe acute respiratory syndrome coronavirus 2
  REGION 1..12: note = Table B: HLA-DPA1*03:01-B1*105:01L
ILTSLLVLVQST

SEQ ID NO: 24553 - protein, 13 aa, Severe acute respiratory syndrome coronavirus 2
  REGION 1..13: note = Table B: HLA-DPA1*03:01-B1*105:01L
HAFLCLFLLPSLA

SEQ ID NO: 24554 - protein, 12 aa, Severe acute respiratory syndrome coronavirus 2
  REGION 1..12: note = Table B: HLA-DPA1*03:01-B1*105:01L
YFNMVYMPASWV

SEQ ID NO: 24555 - protein, 12 aa, Severe acute respiratory syndrome coronavirus 2
  REGION 1..12: note = Table B: HLA-DPA1*03:01-B1*105:01L HLA-DRB1*15:03L
MRIMTWLDMVDT

SEQ ID NO: 24556 - protein, 14 aa, Severe acute respiratory syndrome coronavirus 2
  REGION 1..14: note = Table B: HLA-DPA1*03:01-B1*105:01L
DTSLSGFKLKDCVM

SEQ ID NO: 24557 - protein, 12 aa, Severe acute respiratory syndrome coronavirus 2
  REGION 1..12: note = Table B: HLA-DPA1*03:01-B1*105:01L
FKLKDCVMYASA

SEQ ID NO: 24558 - protein, 14 aa, Severe acute respiratory syndrome coronavirus 2
  REGION 1..14: note = Table B: HLA-DPA1*03:01-B1*105:01L
KLKDCVMYASAVVL

SEQ ID NO: 24559 - protein, 10 aa, Severe acute respiratory syndrome coronavirus 2
  REGION 1..10: note = Table B: HLA-DPA1*03:01-B1*105:01L HLA-DQA1*03:01-B1*03:02L HLA-DPA1*01:02-B1*04:01L HLA-DQA1*02:01-B1*03:03L
LMNVLTLVYK

SEQ ID NO: 24560 - protein, 13 aa, Severe acute respiratory syndrome coronavirus 2
  REGION 1..13: note = Table B: HLA-DPA1*03:01-B1*105:01L
RGIVFMCVEYCPI

SEQ ID NO: 24561 - protein, 10 aa, Severe acute respiratory syndrome coronavirus 2
  REGION 1..10: note = Table B: HLA-DPA1*03:01-B1*105:01L HLA-DPA1*01:02-B1*04:01L
YFGLFCLLNR

SEQ ID NO: 24562 - protein, 13 aa, Severe acute respiratory syndrome coronavirus 2
  REGION 1..13: note = Table B: HLA-DPA1*03:01-B1*105:01L
RLTLGVYDYLVST

SEQ ID NO: 24563 - protein, 15 aa, Severe acute respiratory syndrome coronavirus 2
  REGION 1..15: note = Table B: HLA-DPA1*03:01-B1*105:01L
SDVKCTSVVLLSVLQ

SEQ ID NO: 24564 - protein, 15 aa, Severe acute respiratory syndrome coronavirus 2
  REGION 1..15: note = Table B: HLA-DPA1*03:01-B1*105:01L
DVKCTSVVLLSVLQQ

SEQ ID NO: 24565 - protein, 12 aa, Severe acute respiratory syndrome coronavirus 2
  REGION 1..12: note = Table B: HLA-DPA1*03:01-B1*105:01L
LQAIASEFSSLP

SEQ ID NO: 24566 - protein, 12 aa, Severe acute respiratory syndrome coronavirus 2
  REGION 1..12: note = Table B: HLA-DPA1*03:01-B1*105:01L HLA-DQA1*01:03-B1*06:01L
IASEFSSLPSYA

SEQ ID NO: 24567 - protein, 13 aa, Severe acute respiratory syndrome coronavirus 2
  REGION 1..13: note = Table B: HLA-DPA1*03:01-B1*105:01L
FATAQEAYEQAVA

SEQ ID NO: 24568 - protein, 16 aa, Severe acute respiratory syndrome coronavirus 2
  REGION 1..16: note = Table B: HLA-DPA1*03:01-B1*105:01L HLA-DPA1*01:03-B1*104:01L
VVLKKLKKSLNVAKSE

SEQ ID NO: 24569 - protein, 16 aa, Severe acute respiratory syndrome coronavirus 2
  REGION 1..16: note = Table B: HLA-DPA1*03:01-B1*105:01L
LKKLKKSLNVAKSEFD

SEQ ID NO: 24570 - protein, 17 aa, Severe acute respiratory syndrome coronavirus 2
  REGION 1..17: note = Table B: HLA-DPA1*03:01-B1*105:01L HLA-DRB1*08:03L
DRDAAMQRKLEKMADQA

SEQ ID NO: 24571 - protein, 14 aa, Severe acute respiratory syndrome coronavirus 2
  REGION 1..14: note = Table B: HLA-DPA1*03:01-B1*105:01L HLA-DRB1*15:03L
ADQAMTQMYKQARS

SEQ ID NO: 24572 - protein, 10 aa, Severe acute respiratory syndrome coronavirus 2
  REGION 1..10: note = Table B: HLA-DPA1*03:01-B1*105:01L HLA-DPA1*01:02-B1*04:01L HLA-DQA1*01:03-B1*06:01L
MQTMLFTMLR

SEQ ID NO: 24573 - protein, 16 aa, Severe acute respiratory syndrome coronavirus 2
  REGION 1..16: note = Table B: HLA-DPA1*03:01-B1*105:01L HLA-DQA1*05:05-B1*03:01L
INNARDGCVPLNIIPL

SEQ ID NO: 24574 - protein, 15 aa, Severe acute respiratory syndrome coronavirus 2
  REGION 1..15: note = Table B: HLA-DPA1*03:01-B1*105:01L
NARDGCVPLNIIPLT

SEQ ID NO: 24575 - protein, 12 aa, Severe acute respiratory syndrome coronavirus 2
  REGION 1..12: note = Table B: HLA-DPA1*03:01-B1*105:01L HLA-DRB1*15:03L
ISMDNSPNLAWP

SEQ ID NO: 24576 - protein, 15 aa, Severe acute respiratory syndrome coronavirus 2
  REGION 1..15: note = Table B: HLA-DPA1*03:01-B1*105:01L
PVALRQMSCAAGTTQ

SEQ ID NO: 24577 - protein, 10 aa, Severe acute respiratory syndrome coronavirus 2
  REGION 1..10: note = Table B: HLA-DPA1*03:01-B1*105:01L
YFIKGLNNLN

SEQ ID NO: 24578 - protein, 13 aa, Severe acute respiratory syndrome coronavirus 2
  REGION 1..13: note = Table B: HLA-DPA1*03:01-B1*105:01L
TVLSFCAFAVDAA

SEQ ID NO: 24579 - protein, 12 aa, Severe acute respiratory syndrome coronavirus 2
  REGION 1..12: note = Table B: HLA-DPA1*03:01-B1*105:01L
VCTVCGMWKGYG

SEQ ID NO: 24580 - protein, 10 aa, Severe acute respiratory syndrome coronavirus 2
  REGION 1..10: note = Table B: HLA-DPA1*03:01-B1*105:01L HLA-DPA1*01:02-B1*04:01L HLA-DQA1*01:03-B1*06:01L HLA-DQA1*02:01-B1*03:03L
AGFAKFLKTN

SEQ ID NO: 24581 - protein, 16 aa, Severe acute respiratory syndrome coronavirus 2
  REGION 1..16: note = Table B: HLA-DPA1*03:01-B1*105:01L
AKFLKTNCCRFQEKDE

SEQ ID NO: 24582 - protein, 18 aa, Severe acute respiratory syndrome coronavirus 2
  REGION 1..18: note = Table B: HLA-DPA1*03:01-B1*105:01L
KFLKTNCCRFQEKDEDDN

SEQ ID NO: 24583 - protein, 12 aa, Severe acute respiratory syndrome coronavirus 2
  REGION 1..12: note = Table B: HLA-DPA1*03:01-B1*105:01L HLA-DRB1*04:08L
IDGDMVPHISRQ

SEQ ID NO: 24584 - protein, 15 aa, Severe acute respiratory syndrome coronavirus 2
  REGION 1..15: note = Table B: HLA-DPA1*03:01-B1*105:01L
VYALRHFDEGNCDTL

SEQ ID NO: 24585 - protein, 17 aa, Severe acute respiratory syndrome coronavirus 2
  REGION 1..17: note = Table B: HLA-DPA1*03:01-B1*105:01L
ALRHFDEGNCDTLKEIL

SEQ ID NO: 24586 - protein, 16 aa, Severe acute respiratory syndrome coronavirus 2
  REGION 1..16: note = Table B: HLA-DPA1*03:01-B1*105:01L
LVTYNCCDDDYFNKKD

SEQ ID NO: 24587 - protein, 12 aa, Severe acute respiratory syndrome coronavirus 2
  REGION 1..12: note = Table B: HLA-DPA1*03:01-B1*105:01L
VENPDILRVYAN

SEQ ID NO: 24588 - protein, 11 aa, Severe acute respiratory syndrome coronavirus 2
  REGION 1..11: note = Table B: HLA-DPA1*03:01-B1*105:01L
LLKTVQFCDAM

SEQ ID NO: 24589 - protein, 13 aa, Severe acute respiratory syndrome coronavirus 2
  REGION 1..13: note = Table B: HLA-DPA1*03:01-B1*105:01L
NWYDFGDFIQTTP

SEQ ID NO: 24590 - protein, 11 aa, Severe acute respiratory syndrome coronavirus 2
  REGION 1..11: note = Table B: HLA-DPA1*03:01-B1*105:01L
SYYSLLMPILT

SEQ ID NO: 24591 - protein, 13 aa, Severe acute respiratory syndrome coronavirus 2
  REGION 1..13: note = Table B: HLA-DPA1*03:01-B1*105:01L
VDTDLTKPYIKWD

SEQ ID NO: 24592 - protein, 12 aa, Severe acute respiratory syndrome coronavirus 2
  REGION 1..12: note = Table B: HLA-DPA1*03:01-B1*105:01L
YIKWDLLKYDFT

SEQ ID NO: 24593 - protein, 12 aa, Severe acute respiratory syndrome coronavirus 2
  REGION 1..12: note = Table B: HLA-DPA1*03:01-B1*105:01L HLA-DPA1*01:02-B1*04:01L
IKWDLLKYDFTE

SEQ ID NO: 24594 - protein, 14 aa, Severe acute respiratory syndrome coronavirus 2
  REGION 1..14: note = Table B: HLA-DPA1*03:01-B1*105:01L
YDFTEERLKLFDRY

SEQ ID NO: 24595 - protein, 14 aa, Severe acute respiratory syndrome coronavirus 2
  REGION 1..14: note = Table B: HLA-DPA1*03:01-B1*105:01L
VVHNQDVNLHSSRL

SEQ ID NO: 24596 - protein, 13 aa, Severe acute respiratory syndrome coronavirus 2
  REGION 1..13: note = Table B: HLA-DPA1*03:01-B1*105:01L
LSFKELLVYAADP

SEQ ID NO: 24597 - protein, 12 aa, Severe acute respiratory syndrome coronavirus 2
  REGION 1..12: note = Table B: HLA-DPA1*03:01-B1*105:01L
AASGNLLLDKRT

SEQ ID NO: 24598 - protein, 14 aa, Severe acute respiratory syndrome coronavirus 2
  REGION 1..14: note = Table B: HLA-DPA1*03:01-B1*105:01L
TTCFSVAALTNNVA

SEQ ID NO: 24599 - protein, 13 aa, Severe acute respiratory syndrome coronavirus 2
  REGION 1..13: note = Table B: HLA-DPA1*03:01-B1*105:01L
AQDGNAAISDYDY

SEQ ID NO: 24600 - protein, 13 aa, Severe acute respiratory syndrome coronavirus 2
  REGION 1..13: note = Table B: HLA-DPA1*03:01-B1*105:01L
DIRQLLFVVEVVD

SEQ ID NO: 24601 - protein, 16 aa, Severe acute respiratory syndrome coronavirus 2
  REGION 1..16: note = Table B: HLA-DPA1*03:01-B1*105:01L
PFNKWGKARLYYDSMS

SEQ ID NO: 24602 - protein, 13 aa, Severe acute respiratory syndrome coronavirus 2
  REGION 1..13: note = Table B: HLA-DPA1*03:01-B1*105:01L HLA-DQA1*05:05-B1*03:01L
ARTVAGVSICSTM

SEQ ID NO: 24603 - protein, 14 aa, Severe acute respiratory syndrome coronavirus 2
  REGION 1..14: note = Table B: HLA-DPA1*03:01-B1*105:01L
RTVAGVSICSTMTN

SEQ ID NO: 24604 - protein, 14 aa, Severe acute respiratory syndrome coronavirus 2
  REGION 1..14: note = Table B: HLA-DPA1*03:01-B1*105:01L
LRIMASLVLARKHT

SEQ ID NO: 24605 - protein, 12 aa, Severe acute respiratory syndrome coronavirus 2
  REGION 1..12: note = Table B: HLA-DPA1*03:01-B1*105:01L HLA-DQA1*05:05-B1*03:01L
LANECAQVLSEM

SEQ ID NO: 24606 - protein, 12 aa, Severe acute respiratory syndrome coronavirus 2
  REGION 1..12: note = Table B: HLA-DPA1*03:01-B1*105:01L
LYYQNNVFMSEA

SEQ ID NO: 24607 - protein, 12 aa, Severe acute respiratory syndrome coronavirus 2
  REGION 1..12: note = Table B: HLA-DPA1*03:01-B1*105:01L
FVSLAIDAYPLT

SEQ ID NO: 24608 - protein, 13 aa, Severe acute respiratory syndrome coronavirus 2
  REGION 1..13: note = Table B: HLA-DPA1*03:01-B1*105:01L
NTSRYWEPEFYEA

SEQ ID NO: 24609 - protein, 12 aa, Severe acute respiratory syndrome coronavirus 2
  REGION 1..12: note = Table B: HLA-DPA1*03:01-B1*105:01L
WEPEFYEAMYTP

SEQ ID NO: 24610 - protein, 12 aa, Severe acute respiratory syndrome coronavirus 2
  REGION 1..12: note = Table B: HLA-DPA1*03:01-B1*105:01L
LSVNPYVCNAPG

SEQ ID NO: 24611 - protein, 12 aa, Severe acute respiratory syndrome coronavirus 2
  REGION 1..12: note = Table B: HLA-DPA1*03:01-B1*105:01L
TFEKGDYGDAVV

SEQ ID NO: 24612 - protein, 12 aa, Severe acute respiratory syndrome coronavirus 2
  REGION 1..12: note = Table B: HLA-DPA1*03:01-B1*105:01L HLA-DRB1*04:08L
YGDAVVYRGTTT

SEQ ID NO: 24613 - protein, 12 aa, Severe acute respiratory syndrome coronavirus 2
  REGION 1..12: note = Table B: HLA-DPA1*03:01-B1*105:01L
HFAIGLALYYPS

SEQ ID NO: 24614 - protein, 12 aa, Severe acute respiratory syndrome coronavirus 2
  REGION 1..12: note = Table B: HLA-DPA1*03:01-B1*105:01L
FAIGLALYYPSA

SEQ ID NO: 24615 - protein, 14 aa, Severe acute respiratory syndrome coronavirus 2
  REGION 1..14: note = Table B: HLA-DPA1*03:01-B1*105:01L
LPIDKCSRIIPARA

SEQ ID NO: 24616 - protein, 16 aa, Severe acute respiratory syndrome coronavirus 2
  REGION 1..16: note = Table B: HLA-DPA1*03:01-B1*105:01L
ARVECFDKFKVNSTLE

SEQ ID NO: 24617 - protein, 13 aa, Severe acute respiratory syndrome coronavirus 2
  REGION 1..13: note = Table B: HLA-DPA1*03:01-B1*105:01L
MKTIGPDMFLGTC

SEQ ID NO: 24618 - protein, 15 aa, Severe acute respiratory syndrome coronavirus 2
  REGION 1..15: note = Table B: HLA-DPA1*03:01-B1*105:01L
PAWRKAVFISPYNSQ

SEQ ID NO: 24619 - protein, 13 aa, Severe acute respiratory syndrome coronavirus 2
  REGION 1..13: note = Table B: HLA-DPA1*03:01-B1*105:01L
SQNAVASKILGLP

SEQ ID NO: 24620 - protein, 11 aa, Severe acute respiratory syndrome coronavirus 2
  REGION 1..11: note = Table B: HLA-DPA1*03:01-B1*105:01L HLA-DPA1*01:02-B1*04:01L HLA-DQA1*02:01-B1*03:03L
VASKILGLPTQ

SEQ ID NO: 24621 - protein, 16 aa, Severe acute respiratory syndrome coronavirus 2
  REGION 1..16: note = Table B: HLA-DPA1*03:01-B1*105:01L HLA-DQA1*03:01-B1*03:02L HLA-DRB1*15:03L
ITRAKVGILCIMSDRD

SEQ ID NO: 24622 - protein, 13 aa, Severe acute respiratory syndrome coronavirus 2
  REGION 1..13: note = Table B: HLA-DPA1*03:01-B1*105:01L HLA-DQA1*05:05-B1*03:01L HLA-DQA1*01:03-B1*06:01L HLA-DQA1*02:01-B1*03:03L
ISMMGFKMNYQVN

SEQ ID NO: 24623 - protein, 12 aa, Severe acute respiratory syndrome coronavirus 2
  REGION 1..12: note = Table B: HLA-DPA1*03:01-B1*105:01L
WIGFDVEGCHAT

SEQ ID NO: 24624 - protein, 12 aa, Severe acute respiratory syndrome coronavirus 2
  REGION 1..12: note = Table B: HLA-DPA1*03:01-B1*105:01L
VQMLSDTLKNLS

SEQ ID NO: 24625 - protein, 14 aa, Severe acute respiratory syndrome coronavirus 2
  REGION 1..14: note = Table B: HLA-DPA1*03:01-B1*105:01L
DTLKNLSDRVVFVL

SEQ ID NO: 24626 - protein, 14 aa, Severe acute respiratory syndrome coronavirus 2
  REGION 1..14: note = Table B: HLA-DPA1*03:01-B1*105:01L HLA-DQA1*01:03-B1*06:01L HLA-DRB1*15:03L
ELTSMKYFVKIGPE

SEQ ID NO: 24627 - protein, 13 aa, Severe acute respiratory syndrome coronavirus 2
  REGION 1..13: note = Table B: HLA-DPA1*03:01-B1*105:01L
HHSIGFDYVYNPF

SEQ ID NO: 24628 - protein, 13 aa, Severe acute respiratory syndrome coronavirus 2
  REGION 1..13: note = Table B: HLA-DPA1*03:01-B1*105:01L
NLQSNHDLYCQVH

SEQ ID NO: 24629 - protein, 14 aa, Severe acute respiratory syndrome coronavirus 2
  REGION 1..14: note = Table B: HLA-DPA1*03:01-B1*105:01L HLA-DQA1*01:03-B1*06:01L
LQSNHDLYCQVHGN

SEQ ID NO: 24630 - protein, 11 aa, Severe acute respiratory syndrome coronavirus 2
  REGION 1..11: note = Table B: HLA-DPA1*03:01-B1*105:01L HLA-DQA1*01:03-B1*06:01L HLA-DQA1*02:01-B1*03:03L
WTIEYPIIGDE

SEQ ID NO: 24631 - protein, 14 aa, Severe acute respiratory syndrome coronavirus 2
  REGION 1..14: note = Table B: HLA-DPA1*03:01-B1*105:01L
PQADVEWKFYDAQP

SEQ ID NO: 24632 - protein, 17 aa, Severe acute respiratory syndrome coronavirus 2
  REGION 1..17: note = Table B: HLA-DPA1*03:01-B1*105:01L
DKFTDGVCLFWNCNVDR

SEQ ID NO: 24633 - protein, 11 aa, Severe acute respiratory syndrome coronavirus 2
  REGION 1..11: note = Table B: HLA-DPA1*03:01-B1*105:01L HLA-DPA1*01:02-B1*04:01L
FWNCNVDRYPA

SEQ ID NO: 24634 - protein, 13 aa, Severe acute respiratory syndrome coronavirus 2
  REGION 1..13: note = Table B: HLA-DPA1*03:01-B1*105:01L
LKQLPFFYYSDSP

SEQ ID NO: 24635 - protein, 12 aa, Severe acute respiratory syndrome coronavirus 2
  REGION 1..12: note = Table B: HLA-DPA1*03:01-B1*105:01L
SAGFSLWVYKQF

SEQ ID NO: 24636 - protein, 12 aa, Severe acute respiratory syndrome coronavirus 2
  REGION 1..12: note = Table B: HLA-DPA1*03:01-B1*105:01L
QFDTYNLWNTFT

SEQ ID NO: 24637 - protein, 10 aa, Severe acute respiratory syndrome coronavirus 2
  REGION 1..10: note = Table B: HLA-DPA1*03:01-B1*105:01L HLA-DQA1*03:01-B1*03:02L HLA-DPA1*01:02-B1*04:01L
TYNLWNTFTR

SEQ ID NO: 24638 - protein, 13 aa, Severe acute respiratory syndrome coronavirus 2
  REGION 1..13: note = Table B: HLA-DPA1*03:01-B1*105:01L
LNNLGVDIAANTV

SEQ ID NO: 24639 - protein, 14 aa, Severe acute respiratory syndrome coronavirus 2
  REGION 1..14: note = Table B: HLA-DPA1*03:01-B1*105:01L
NNLGVDIAANTVIW

SEQ ID NO: 24640 - protein, 14 aa, Severe acute respiratory syndrome coronavirus 2
  REGION 1..14: note = Table B: HLA-DPA1*03:01-B1*105:01L
PAHISTIGVCSMTD

SEQ ID NO: 24641 - protein, 14 aa, Severe acute respiratory syndrome coronavirus 2
  REGION 1..14: note = Table B: HLA-DPA1*03:01-B1*105:01L
HISTIGVCSMTDIA

SEQ ID NO: 24642 - protein, 14 aa, Severe acute respiratory syndrome coronavirus 2
  REGION 1..14: note = Table B: HLA-DPA1*03:01-B1*105:01L HLA-DQA1*05:05-B1*03:01L HLA-DQA1*02:01-B1*03:03L
ISTIGVCSMTDIAK

SEQ ID NO: 24643 - protein, 16 aa, Severe acute respiratory syndrome coronavirus 2
  REGION 1..16: note = Table B: HLA-DPA1*03:01-B1*105:01L
KPTETICAPLTVFFDG

SEQ ID NO: 24644 - protein, 14 aa, Severe acute respiratory syndrome coronavirus 2
  REGION 1..14: note = Table B: HLA-DPA1*03:01-B1*105:01L
GLQPSVGPKQASLN

SEQ ID NO: 24645 - protein, 14 aa, Severe acute respiratory syndrome coronavirus 2
  REGION 1..14: note = Table B: HLA-DPA1*03:01-B1*105:01L HLA-DQA1*01:03-B1*06:01L
AVKTQFNYYKKVDG

SEQ ID NO: 24646 - protein, 13 aa, Severe acute respiratory syndrome coronavirus 2
  REGION 1..13: note = Table B: HLA-DPA1*03:01-B1*105:01L
PRSQMEIDFLELA

SEQ ID NO: 24647 - protein, 10 aa, Severe acute respiratory syndrome coronavirus 2
  REGION 1..10: note = Table B: HLA-DPA1*03:01-B1*105:01L HLA-DQA1*03:01-B1*03:02L HLA-DPA1*01:02-B1*04:01L HLA-DQA1*01:03-B1*06:01L HLA-DQA1*02:01-B1*03:03L
AMDEFIERYK

SEQ ID NO: 24648 - protein, 13 aa, Severe acute respiratory syndrome coronavirus 2
  REGION 1..13: note = Table B: HLA-DPA1*03:01-B1*105:01L
SQLGGLHLLIGLA

SEQ ID NO: 24649 - protein, 12 aa, Severe acute respiratory syndrome coronavirus 2
  REGION 1..12: note = Table B: HLA-DPA1*03:01-B1*105:01L HLA-DRB1*15:03L
DLSVVSKVVKVT

SEQ ID NO: 24650 - protein, 16 aa, Severe acute respiratory syndrome coronavirus 2
  REGION 1..16: note = Table B: HLA-DPA1*03:01-B1*105:01L HLA-DRB1*15:03L
FMLWCKDGHVETFYPK

SEQ ID NO: 24651 - protein, 15 aa, Severe acute respiratory syndrome coronavirus 2
  REGION 1..15: note = Table B: HLA-DPA1*03:01-B1*105:01L
LYKMQRMLLEKCDLQ

SEQ ID NO: 24652 - protein, 12 aa, Severe acute respiratory syndrome coronavirus 2
  REGION 1..12: note = Table B: HLA-DPA1*03:01-B1*105:01L
KYTQLCQYLNTL

SEQ ID NO: 24653 - protein, 14 aa, Severe acute respiratory syndrome coronavirus 2
  REGION 1..14: note = Table B: HLA-DPA1*03:01-B1*105:01L
NMRVIHFGAGSDKG

SEQ ID NO: 24654 - protein, 12 aa, Severe acute respiratory syndrome coronavirus 2
  REGION 1..12: note = Table B: HLA-DPA1*03:01-B1*105:01L
WDLIISDMYDPK

SEQ ID NO: 24655 - protein, 12 aa, Severe acute respiratory syndrome coronavirus 2
  REGION 1..12: note = Table B: HLA-DPA1*03:01-B1*105:01L HLA-DRB1*15:03L
LIISDMYDPKTK

SEQ ID NO: 24656 - protein, 14 aa, Severe acute respiratory syndrome coronavirus 2
  REGION 1..14: note = Table B: HLA-DPA1*03:01-B1*105:01L
ICGFIQQKLALGGS

SEQ ID NO: 24657 - protein, 11 aa, Severe acute respiratory syndrome coronavirus 2
  REGION 1..11: note = Table B: HLA-DPA1*03:01-B1*105:01L
LGGSVAIKITE

SEQ ID NO: 24658 - protein, 12 aa, Severe acute respiratory syndrome coronavirus 2
  REGION 1..12: note = Table B: HLA-DPA1*03:01-B1*105:01L HLA-DQA1*03:01-B1*03:02L
NADLYKLMGHFA

SEQ ID NO: 24659 - protein, 13 aa, Severe acute respiratory syndrome coronavirus 2
  REGION 1..13: note = Table B: HLA-DPA1*03:01-B1*105:01L
ASSSEAFLIGCNY

SEQ ID NO: 24660 - protein, 12 aa, Severe acute respiratory syndrome coronavirus 2
  REGION 1..12: note = Table B: HLA-DPA1*03:01-B1*105:01L
AFLIGCNYLGKP

SEQ ID NO: 24661 - protein, 11 aa, Severe acute respiratory syndrome coronavirus 2
  REGION 1..11: note = Table B: HLA-DPA1*03:01-B1*105:01L
FVFLVLLPLVS

SEQ ID NO: 24662 - protein, 12 aa, Severe acute respiratory syndrome coronavirus 2
  REGION 1..12: note = Table B: HLA-DPA1*03:01-B1*105:01L
VFLVLLPLVSSQ

SEQ ID NO: 24663 - protein, 12 aa, Severe acute respiratory syndrome coronavirus 2
  REGION 1..12: note = Table B: HLA-DPA1*03:01-B1*105:01L HLA-DRB1*04:08L
TWFHAIHVSGTN

SEQ ID NO: 24664 - protein, 13 aa, Severe acute respiratory syndrome coronavirus 2
  REGION 1..13: note = Table B: HLA-DPA1*03:01-B1*105:01L
PFNDGVYFASTEK

SEQ ID NO: 24665 - protein, 11 aa, Severe acute respiratory syndrome coronavirus 2
  REGION 1..11: note = Table B: HLA-DPA1*03:01-B1*105:01L HLA-DRB1*08:02L
STEKSNIIRGW

SEQ ID NO: 24666 - protein, 12 aa, Severe acute respiratory syndrome coronavirus 2
  REGION 1..12: note = Table B: HLA-DPA1*03:01-B1*105:01L HLA-DQA1*05:05-B1*03:01L HLA-DQA1*02:01-B1*03:03L
ATNVVIKVCEFQ

SEQ ID NO: 24667 - protein, 14 aa, Severe acute respiratory syndrome coronavirus 2
  REGION 1..14: note = Table B: HLA-DPA1*03:01-B1*105:01L
SSANNCTFEYVSQP

SEQ ID NO: 24668 - protein, 12 aa, Severe acute respiratory syndrome coronavirus 2
  REGION 1..12: note = Table B: HLA-DPA1*03:01-B1*105:01L HLA-DQA1*01:03-B1*06:01L HLA-DQA1*02:01-B1*03:03L
SSSGWTAGAAAY

SEQ ID NO: 24669 - protein, 10 aa, Severe acute respiratory syndrome coronavirus 2
  REGION 1..10: note = Table B: HLA-DPA1*03:01-B1*105:01L HLA-DQA1*03:01-B1*03:02L HLA-DPA1*01:02-B1*04:01L HLA-DQA1*01:03-B1*06:01L HLA-DQA1*02:01-B1*03:03L
PFGEVFNATR

SEQ ID NO: 24670 - protein, 14 aa, Severe acute respiratory syndrome coronavirus 2
  REGION 1..14: note = Table B: HLA-DPA1*03:01-B1*105:01L HLA-DQA1*01:03-B1*06:01L
KLNDLCFTNVYADS

SEQ ID NO: 24671 - protein, 15 aa, Severe acute respiratory syndrome coronavirus 2
  REGION 1..15: note = Table B: HLA-DPA1*03:01-B1*105:01L
YNYKLPDDFTGCVIA

SEQ ID NO: 24672 - protein, 15 aa, Severe acute respiratory syndrome coronavirus 2
  REGION 1..15: note = Table B: HLA-DPA1*03:01-B1*105:01L
YRLFRKSNLKPFERD

SEQ ID NO: 24673 - protein, 13 aa, Severe acute respiratory syndrome coronavirus 2
  REGION 1..13: note = Table B: HLA-DPA1*03:01-B1*105:01L
FERDISTEIYQAG

SEQ ID NO: 24674 - protein, 13 aa, Severe acute respiratory syndrome coronavirus 2
  REGION 1..13: note = Table B: HLA-DPA1*03:01-B1*105:01L
ERDISTEIYQAGS

SEQ ID NO: 24675 - protein, 13 aa, Severe acute respiratory syndrome coronavirus 2
  REGION 1..13: note = Table B: HLA-DPA1*03:01-B1*105:01L HLA-DQA1*02:01-B1*03:03L
RDISTEIYQAGST

SEQ ID NO: 24676 - protein, 12 aa, Severe acute respiratory syndrome coronavirus 2
  REGION 1..12: note = Table B: HLA-DPA1*03:01-B1*105:01L
NGVGYQPYRVVV

SEQ ID NO: 24677 - protein, 15 aa, Severe acute respiratory syndrome coronavirus 2
  REGION 1..15: note = Table B: HLA-DPA1*03:01-B1*105:01L
PFQQFGRDIADTTDA

SEQ ID NO: 24678 - protein, 15 aa, Severe acute respiratory syndrome coronavirus 2
  REGION 1..15: note = Table B: HLA-DPA1*03:01-B1*105:01L
AEHVNNSYECDIPIG

SEQ ID NO: 24679 - protein, 14 aa, Severe acute respiratory syndrome coronavirus 2
  REGION 1..14: note = Table B: HLA-DPA1*03:01-B1*105:01L HLA-DQA1*01:03-B1*06:01L
KTSVDCTMYICGDS

SEQ ID NO: 24680 - protein, 13 aa, Severe acute respiratory syndrome coronavirus 2
  REGION 1..13: note = Table B: HLA-DPA1*03:01-B1*105:01L
DSTECSNLLLQYG

SEQ ID NO: 24681 - protein, 14 aa, Severe acute respiratory syndrome coronavirus 2
  REGION 1..14: note = Table B: HLA-DPA1*03:01-B1*105:01L
STECSNLLLQYGSF

SEQ ID NO: 24682 - protein, 11 aa, Severe acute respiratory syndrome coronavirus 2
  REGION 1..11: note = Table B: HLA-DPA1*03:01-B1*105:01L HLA-DQA1*01:03-B1*06:01L
LQYGSFCTQLN

SEQ ID NO: 24683 - protein, 12 aa, Severe acute respiratory syndrome coronavirus 2
  REGION 1..12: note = Table B: HLA-DPA1*03:01-B1*105:01L
YGSFCTQLNRAL

SEQ ID NO: 24684 - protein, 12 aa, Severe acute respiratory syndrome coronavirus 2
  REGION 1..12: note = Table B: HLA-DPA1*03:01-B1*105:01L HLA-DQA1*02:01-B1*03:03L
GSFCTQLNRALT

SEQ ID NO: 24685 - protein, 11 aa, Severe acute respiratory syndrome coronavirus 2
  REGION 1..11: note = Table B: HLA-DPA1*03:01-B1*105:01L
LTGIAVEQDKN

SEQ ID NO: 24686 - protein, 17 aa, Severe acute respiratory syndrome coronavirus 2
  REGION 1..17: note = Table B: HLA-DPA1*03:01-B1*105:01L
PPIKDFGGFNFSQILPD

SEQ ID NO: 24687 - protein, 11 aa, Severe acute respiratory syndrome coronavirus 2
  REGION 1..11: note = Table B: HLA-DPA1*03:01-B1*105:01L
GFNFSQILPDP

SEQ ID NO: 24688 - protein, 14 aa, Severe acute respiratory syndrome coronavirus 2
  REGION 1..14: note = Table B: HLA-DPA1*03:01-B1*105:01L
DIAARDLICAQKFN

SEQ ID NO: 24689 - protein, 13 aa, Severe acute respiratory syndrome coronavirus 2
  REGION 1..13: note = Table B: HLA-DPA1*03:01-B1*105:01L HLA-DQA1*01:03-B1*06:01L
PPLLTDEMIAQYT

SEQ ID NO: 24690 - protein, 14 aa, Severe acute respiratory syndrome coronavirus 2
  REGION 1..14: note = Table B: HLA-DPA1*03:01-B1*105:01L
PLLTDEMIAQYTSA

SEQ ID NO: 24691 - protein, 13 aa, Severe acute respiratory syndrome coronavirus 2
  REGION 1..13: note = Table B: HLA-DPA1*03:01-B1*105:01L
TITSGWTFGAGAA

SEQ ID NO: 24692 - protein, 12 aa, Severe acute respiratory syndrome coronavirus 2
  REGION 1..12: note = Table B: HLA-DPA1*03:01-B1*105:01L HLA-DQA1*05:05-B1*03:01L HLA-DQA1*02:01-B1*03:03L
TKMSECVLGQSK

SEQ ID NO: 24693 - protein, 13 aa, Severe acute respiratory syndrome coronavirus 2
  REGION 1..13: note = Table B: HLA-DPA1*03:01-B1*105:01L
FYEPQIITTDNTF

SEQ ID NO: 24694 - protein, 12 aa, Severe acute respiratory syndrome coronavirus 2
  REGION 1..12: note = Table B: HLA-DPA1*03:01-B1*105:01L
YEQYIKWPWYIW

SEQ ID NO: 24695 - protein, 12 aa, Severe acute respiratory syndrome coronavirus 2
  REGION 1..12: note = Table B: HLA-DPA1*03:01-B1*105:01L
LFMRIFTIGTVT

SEQ ID NO: 24696 - protein, 14 aa, Severe acute respiratory syndrome coronavirus 2
  REGION 1..14: note = Table B: HLA-DPA1*03:01-B1*105:01L HLA-DQA1*05:05-B1*03:01L
TVTLKQGEIKDATP

SEQ ID NO: 24697 - protein, 13 aa, Severe acute respiratory syndrome coronavirus 2
  REGION 1..13: note = Table B: HLA-DPA1*03:01-B1*105:01L
LKQGEIKDATPSD

SEQ ID NO: 24698 - protein, 18 aa, Severe acute respiratory syndrome coronavirus 2
  REGION 1..18: note = Table B: HLA-DPA1*03:01-B1*105:01L
ASKIITLKKRWQLALSKG

SEQ ID NO: 24699 - protein, 13 aa, Severe acute respiratory syndrome coronavirus 2
  REGION 1..13: note = Table B: HLA-DPA1*03:01-B1*105:01L HLA-DQA1*01:03-B1*06:01L
SPISEHDYQIGGY

SEQ ID NO: 24700 - protein, 12 aa, Severe acute respiratory syndrome coronavirus 2
  REGION 1..12: note = Table B: HLA-DPA1*03:01-B1*105:01L
SGVKDCVVLHSY

SEQ ID NO: 24701 - protein, 12 aa, Severe acute respiratory syndrome coronavirus 2
  REGION 1..12: note = Table B: HLA-DPA1*03:01-B1*105:01L
VKDCVVLHSYFT

SEQ ID NO: 24702 - protein, 12 aa, Severe acute respiratory syndrome coronavirus 2
  REGION 1..12: note = Table B: HLA-DPA1*03:01-B1*105:01L HLA-DRB1*15:03L
VLHSYFTSDYYQ

SEQ ID NO: 24703 - protein, 14 aa, Severe acute respiratory syndrome coronavirus 2
  REGION 1..14: note = Table B: HLA-DPA1*03:01-B1*105:01L
LYSTQLSTDTGVEH

SEQ ID NO: 24704 - protein, 15 aa, Severe acute respiratory syndrome coronavirus 2
  REGION 1..15: note = Table B: HLA-DPA1*03:01-B1*105:01L
ALRLCAYCCNIVNVS

SEQ ID NO: 24705 - protein, 10 aa, Severe acute respiratory syndrome coronavirus 2
  REGION 1..10: note = Table B: HLA-DPA1*03:01-B1*105:01L HLA-DQA1*01:03-B1*06:01L
ITVEELKKLL

SEQ ID NO: 24706 - protein, 14 aa, Severe acute respiratory syndrome coronavirus 2
  REGION 1..14: note = Table B: HLA-DPA1*03:01-B1*105:01L
TWICLLQFAYANRN

SEQ ID NO: 24707 - protein, 15 aa, Severe acute respiratory syndrome coronavirus 2
  REGION 1..15: note = Table B: HLA-DPA1*03:01-B1*105:01L
WPVTLACFVLAAVYR

SEQ ID NO: 24708 - protein, 10 aa, Severe acute respiratory syndrome coronavirus 2
  REGION 1..10: note = Table B: HLA-DPA1*03:01-B1*105:01L HLA-DPA1*01:02-B1*04:01L
WLSYFIASFR

SEQ ID NO: 24709 - protein, 12 aa, Severe acute respiratory syndrome coronavirus 2
  REGION 1..12: note = Table B: HLA-DPA1*03:01-B1*105:01L HLA-DQA1*01:03-B1*06:01L
FNPETNILLNVP

SEQ ID NO: 24710 - protein, 10 aa, Severe acute respiratory syndrome coronavirus 2
  REGION 1..10: note = Table B: HLA-DPA1*03:01-B1*105:01L
IAEILLIIMR

SEQ ID NO: 24711 - protein, 11 aa, Severe acute respiratory syndrome coronavirus 2
  REGION 1..11: note = Table B: HLA-DPA1*03:01-B1*105:01L
LITLATCELYH

SEQ ID NO: 24712 - protein, 15 aa, Severe acute respiratory syndrome coronavirus 2
  REGION 1..15: note = Table B: HLA-DPA1*03:01-B1*105:01L HLA-DQA1*05:05-B1*03:01L HLA-DRB1*04:08L HLA-DRB1*15:03L
TTVLLKEPCSSGTYE

SEQ ID NO: 24713 - protein, 12 aa, Severe acute respiratory syndrome coronavirus 2
  REGION 1..12: note = Table B: HLA-DPA1*03:01-B1*105:01L
KFALTCFSTQFA

SEQ ID NO: 24714 - protein, 10 aa, Severe acute respiratory syndrome coronavirus 2
  REGION 1..10: note = Table B: HLA-DPA1*03:01-B1*105:01L
WFSLELQDHN

SEQ ID NO: 24715 - protein, 13 aa, Severe acute respiratory syndrome coronavirus 2
  REGION 1..13: note = Table B: HLA-DPA1*03:01-B1*105:01L HLA-DQA1*05:05-B1*03:01L HLA-DRB1*15:03L
VFLGIITTVAAFH

SEQ ID NO: 24716 - protein, 16 aa, Severe acute respiratory syndrome coronavirus 2
  REGION 1..16: note = Table B: HLA-DPA1*03:01-B1*105:01L HLA-DQA1*01:03-B1*06:01L
VGARKSAPLIELCVDE

SEQ ID NO: 24717 - protein, 16 aa, Severe acute respiratory syndrome coronavirus 2
  REGION 1..16: note = Table B: HLA-DPA1*03:01-B1*105:01L
PLIELCVDEAGSKSPI

SEQ ID NO: 24718 - protein, 11 aa, Severe acute respiratory syndrome coronavirus 2
  REGION 1..11: note = Table B: HLA-DPA1*03:01-B1*105:01L
YTVSCLPFTIN

SEQ ID NO: 24719 - protein, 14 aa, Severe acute respiratory syndrome coronavirus 2
  REGION 1..14: note = Table B: HLA-DPA1*03:01-B1*105:01L
PFTINCQEPKLGSL

SEQ ID NO: 24720 - protein, 14 aa, Severe acute respiratory syndrome coronavirus 2
  REGION 1..14: note = Table B: HLA-DPA1*03:01-B1*105:01L
EPKLGSLVVRCSFY

SEQ ID NO: 24721 - protein, 14 aa, Severe acute respiratory syndrome coronavirus 2
  REGION 1..14: note = Table B: HLA-DPA1*03:01-B1*105:01L HLA-DQA1*02:01-B1*03:03L
PNNTASWFTALTQH

SEQ ID NO: 24722 - protein, 13 aa, Severe acute respiratory syndrome coronavirus 2
  REGION 1..13: note = Table B: HLA-DPA1*03:01-B1*105:01L HLA-DRB1*15:03L
IIWVATEGALNTP

SEQ ID NO: 24723 - protein, 14 aa, Severe acute respiratory syndrome coronavirus 2
  REGION 1..14: note = Table B: HLA-DPA1*03:01-B1*105:01L
PANNAAIVLQLPQG

SEQ ID NO: 24724 - protein, 11 aa, Severe acute respiratory syndrome coronavirus 2
  REGION 1..11: note = Table B: HLA-DPA1*03:01-B1*105:01L
ALALLLLDRLN

SEQ ID NO: 24725 - protein, 15 aa, Severe acute respiratory syndrome coronavirus 2
  REGION 1..15: note = Table B: HLA-DPA1*03:01-B1*105:01L HLA-DRB1*15:01L
TKAYNVTQAFGRRGP

SEQ ID NO: 24726 - protein, 12 aa, Severe acute respiratory syndrome coronavirus 2
  REGION 1..12: note = Table B: HLA-DPA1*03:01-B1*105:01L HLA-DQA1*05:05-B1*03:01L
GDQELIRQGTDY

SEQ ID NO: 24727 - protein, 15 aa, Severe acute respiratory syndrome coronavirus 2
  REGION 1..15: note = Table B: HLA-DPA1*03:01-B1*105:01L
YKHWPQIAQFAPSAS

SEQ ID NO: 24728 - protein, 12 aa, Severe acute respiratory syndrome coronavirus 2
  REGION 1..12: note = Table B: HLA-DPA1*03:01-B1*105:01L
FPFTIYSLLLCR

SEQ ID NO: 24729 - protein, 13 aa, Severe acute respiratory syndrome coronavirus 2
  REGION 1..13: note = Table B: HLA-DPA1*03:01-B1*105:01L
IYSLLLCRMNSRN

SEQ ID NO: 24730 - protein, 10 aa, Severe acute respiratory syndrome coronavirus 2
  REGION 1..10: note = Table B: HLA-DQA1*03:01-B1*03:02L
PGFNEKTHVQ

SEQ ID NO: 24731 - protein, 11 aa, Severe acute respiratory syndrome coronavirus 2
  REGION 1..11: note = Table B: HLA-DQA1*03:01-B1*03:02L
THVQLSLPVLQ

SEQ ID NO: 24732 - protein, 10 aa, Severe acute respiratory syndrome coronavirus 2
  REGION 1..10: note = Table B: HLA-DQA1*03:01-B1*03:02L HLA-DQA1*05:05-B1*03:01L
QLSLPVLQVR

SEQ ID NO: 24733 - protein, 10 aa, Severe acute respiratory syndrome coronavirus 2
  REGION 1..10: note = Table B: HLA-DQA1*03:01-B1*03:02L
DVLVRGFGDS

SEQ ID NO: 24734 - protein, 10 aa, Severe acute respiratory syndrome coronavirus 2
  REGION 1..10: note = Table B: HLA-DQA1*03:01-B1*03:02L
VEEVLSEARQ

SEQ ID NO: 24735 - protein, 10 aa, Severe acute respiratory syndrome coronavirus 2
  REGION 1..10: note = Table B: HLA-DQA1*03:01-B1*03:02L
EEVLSEARQH

SEQ ID NO: 24736 - protein, 10 aa, Severe acute respiratory syndrome coronavirus 2
  REGION 1..10: note = Table B: HLA-DQA1*03:01-B1*03:02L
VLSEARQHLK

SEQ ID NO: 24737 - protein, 10 aa, Severe acute respiratory syndrome coronavirus 2
  REGION 1..10: note = Table B: HLA-DQA1*03:01-B1*03:02L
LEQPYVFIKR

SEQ ID NO: 24738 - protein, 10 aa, Severe acute respiratory syndrome coronavirus 2
  REGION 1..10: note = Table B: HLA-DQA1*03:01-B1*03:02L
QPYVFIKRSD

SEQ ID NO: 24739 - protein, 10 aa, Severe acute respiratory syndrome coronavirus 2
  REGION 1..10: note = Table B: HLA-DQA1*03:01-B1*03:02L
LEGIQYGRSG

SEQ ID NO: 24740 - protein, 10 aa, Severe acute respiratory syndrome coronavirus 2
  REGION 1..10: note = Table B: HLA-DQA1*03:01-B1*03:02L HLA-DQA1*02:01-B1*03:03L
GIQYGRSGET

SEQ ID NO: 24741 - protein, 10 aa, Severe acute respiratory syndrome coronavirus 2
  REGION 1..10: note = Table B: HLA-DQA1*03:01-B1*03:02L
VGEIPVAYRK

SEQ ID NO: 24742 - protein, 10 aa, Severe acute respiratory syndrome coronavirus 2
  REGION 1..10: note = Table B: HLA-DQA1*03:01-B1*03:02L
GGHSYGADLK

SEQ ID NO: 24743 - protein, 11 aa, Severe acute respiratory syndrome coronavirus 2
  REGION 1..11: note = Table B: HLA-DQA1*03:01-B1*03:02L
HSYGADLKSFD

SEQ ID NO: 24744 - protein, 11 aa, Severe acute respiratory syndrome coronavirus 2
  REGION 1..11: note = Table B: HLA-DQA1*03:01-B1*03:02L
YGADLKSFDLG

SEQ ID NO: 24745 - protein, 14 aa, Severe acute respiratory syndrome coronavirus 2
  REGION 1..14: note = Table B: HLA-DQA1*03:01-B1*03:02L
SFDLGDELGTDPYE

SEQ ID NO: 24746 - protein, 12 aa, Severe acute respiratory syndrome coronavirus 2
  REGION 1..12: note = Table B: HLA-DQA1*03:01-B1*03:02L HLA-DRB1*16:01L
TDPYEDFQENWN

SEQ ID NO: 24747 - protein, 10 aa, Severe acute respiratory syndrome coronavirus 2
  REGION 1..10: note = Table B: HLA-DQA1*03:01-B1*03:02L
EDFQENWNTK

SEQ ID NO: 24748 - protein, 11 aa, Severe acute respiratory syndrome coronavirus 2
  REGION 1..11: note = Table B: HLA-DQA1*03:01-B1*03:02L
DFQENWNTKHS

SEQ ID NO: 24749 - protein, 10 aa, Severe acute respiratory syndrome coronavirus 2
  REGION 1..10: note = Table B: HLA-DQA1*03:01-B1*03:02L
WNTKHSSGVT

SEQ ID NO: 24750 - protein, 10 aa, Severe acute respiratory syndrome coronavirus 2
  REGION 1..10: note = Table B: HLA-DQA1*03:01-B1*03:02L
TKHSSGVTRE

SEQ ID NO: 24751 - protein, 10 aa, Severe acute respiratory syndrome coronavirus 2
  REGION 1..10: note = Table B: HLA-DQA1*03:01-B1*03:02L
EHEIAWYTER

SEQ ID NO: 24752 - protein, 10 aa, Severe acute respiratory syndrome coronavirus 2
  REGION 1..10: note = Table B: HLA-DQA1*03:01-B1*03:02L
KLDGFMGRIR

SEQ ID NO: 24753 - protein, 10 aa, Severe acute respiratory syndrome coronavirus 2
  REGION 1..10: note = Table B: HLA-DQA1*03:01-B1*03:02L
RSVYPVASPN

SEQ ID NO: 24754 - protein, 11 aa, Severe acute respiratory syndrome coronavirus 2
  REGION 1..11: note = Table B: HLA-DQA1*03:01-B1*03:02L
GTENLTKEGAT

SEQ ID NO: 24755 - protein, 12 aa, Severe acute respiratory syndrome coronavirus 2
  REGION 1..12: note = Table B: HLA-DQA1*03:01-B1*03:02L
EVGPEHSLAEYH

SEQ ID NO: 24756 - protein, 11 aa, Severe acute respiratory syndrome coronavirus 2
  REGION 1..11: note = Table B: HLA-DQA1*03:01-B1*03:02L
GPEHSLAEYHN

SEQ ID NO: 24757 - protein, 13 aa, Severe acute respiratory syndrome coronavirus 2
  REGION 1..13: note = Table B: HLA-DQA1*03:01-B1*03:02L
PEHSLAEYHNESG

SEQ ID NO: 24758 - protein, 10 aa, Severe acute respiratory syndrome coronavirus 2
  REGION 1..10: note = Table B: HLA-DQA1*03:01-B1*03:02L
AEYHNESGLK

SEQ ID NO: 24759 - protein, 10 aa, Severe acute respiratory syndrome coronavirus 2
  REGION 1..10: note = Table B: HLA-DQA1*03:01-B1*03:02L
NESGLKTILR

SEQ ID NO: 24760 - protein, 10 aa, Severe acute respiratory syndrome coronavirus 2
  REGION 1..10: note = Table B: HLA-DQA1*03:01-B1*03:02L
ESGLKTILRK

SEQ ID NO: 24761 - protein, 10 aa, Severe acute respiratory syndrome coronavirus 2
  REGION 1..10: note = Table B: HLA-DQA1*03:01-B1*03:02L HLA-DQA1*02:01-B1*03:03L
AYWVPRASAN

SEQ ID NO: 24762 - protein, 11 aa, Severe acute respiratory syndrome coronavirus 2
  REGION 1..11: note = Table B: HLA-DQA1*03:01-B1*03:02L
VGEGSEGLNDN

SEQ ID NO: 24763 - protein, 10 aa, Severe acute respiratory syndrome coronavirus 2
  REGION 1..10: note = Table B: HLA-DQA1*03:01-B1*03:02L
NLLEILQKEK

SEQ ID NO: 24764 - protein, 12 aa, Severe acute respiratory syndrome coronavirus 2
  REGION 1..12: note = Table B: HLA-DQA1*03:01-B1*03:02L
TVKGLDYKAFKQ

SEQ ID NO: 24765 - protein, 11 aa, Severe acute respiratory syndrome coronavirus 2
  REGION 1..11: note = Table B: HLA-DQA1*03:01-B1*03:02L
DYKAFKQIVES

SEQ ID NO: 24766 - protein, 13 aa, Severe acute respiratory syndrome coronavirus 2
  REGION 1..13: note = Table B: HLA-DQA1*03:01-B1*03:02L
GKAKKGAWNIGEQ

SEQ ID NO: 24767 - protein, 10 aa, Severe acute respiratory syndrome coronavirus 2
  REGION 1..10: note = Table B: HLA-DQA1*03:01-B1*03:02L
KGAWNIGEQK

SEQ ID NO: 24768 - protein, 10 aa, Severe acute respiratory syndrome coronavirus 2
  REGION 1..10: note = Table B: HLA-DQA1*03:01-B1*03:02L HLA-DQA1*02:01-B1*03:03L
GAWNIGEQKS

SEQ ID NO: 24769 - protein, 10 aa, Severe acute respiratory syndrome coronavirus 2
  REGION 1..10: note = Table B: HLA-DQA1*03:01-B1*03:02L HLA-DQA1*02:01-B1*03:03L
ASEAARVVRS

SEQ ID NO: 24770 - protein, 11 aa, Severe acute respiratory syndrome coronavirus 2
  REGION 1..11: note = Table B: HLA-DQA1*03:01-B1*03:02L
AARVVRSIFSR

SEQ ID NO: 24771 - protein, 10 aa, Severe acute respiratory syndrome coronavirus 2
  REGION 1..10: note = Table B: HLA-DQA1*03:01-B1*03:02L
LDGISQYSLR

SEQ ID NO: 24772 - protein, 10 aa, Severe acute respiratory syndrome coronavirus 2
  REGION 1..10: note = Table B: HLA-DQA1*03:01-B1*03:02L
KFKEGVEFLR

SEQ ID NO: 24773 - protein, 11 aa, Severe acute respiratory syndrome coronavirus 2
  REGION 1..11: note = Table B: HLA-DQA1*03:01-B1*03:02L
EIKESVQTFFK

SEQ ID NO: 24774 - protein, 10 aa, Severe acute respiratory syndrome coronavirus 2
  REGION 1..10: note = Table B: HLA-DQA1*03:01-B1*03:02L
LNLGETFVTH

SEQ ID NO: 24775 - protein, 10 aa, Severe acute respiratory syndrome coronavirus 2
  REGION 1..10: note = Table B: HLA-DQA1*03:01-B1*03:02L HLA-DPA1*01:02-B1*04:01L
LGETFVTHSK

SEQ ID NO: 24776 - protein, 10 aa, Severe acute respiratory syndrome coronavirus 2
  REGION 1..10: note = Table B: HLA-DQA1*03:01-B1*03:02L
GLLMPLKAPK

SEQ ID NO: 24777 - protein, 12 aa, Severe acute respiratory syndrome coronavirus 2
  REGION 1..12: note = Table B: HLA-DQA1*03:01-B1*03:02L
GETLPTEVLTEE

SEQ ID NO: 24778 - protein, 10 aa, Severe acute respiratory syndrome coronavirus 2
  REGION 1..10: note = Table B: HLA-DQA1*03:01-B1*03:02L
MLLEIKDTEK

SEQ ID NO: 24779 - protein, 11 aa, Severe acute respiratory syndrome coronavirus 2
  REGION 1..11: note = Table B: HLA-DQA1*03:01-B1*03:02L
GAPTKVTFGDD

SEQ ID NO: 24780 - protein, 11 aa, Severe acute respiratory syndrome coronavirus 2
  REGION 1..11: note = Table B: HLA-DQA1*03:01-B1*03:02L
KVTFGDDTVIE

SEQ ID NO: 24781 - protein, 12 aa, Severe acute respiratory syndrome coronavirus 2
  REGION 1..12: note = Table B: HLA-DQA1*03:01-B1*03:02L
VTFGDDTVIEVQ

SEQ ID NO: 24782 - protein, 11 aa, Severe acute respiratory syndrome coronavirus 2
  REGION 1..11: note = Table B: HLA-DQA1*03:01-B1*03:02L
SVNITFELDER

SEQ ID NO: 24783 - protein, 10 aa, Severe acute respiratory syndrome coronavirus 2
  REGION 1..10: note = Table B: HLA-DQA1*03:01-B1*03:02L
TFELDERIDK

SEQ ID NO: 24784 - protein, 11 aa, Severe acute respiratory syndrome coronavirus 2
  REGION 1..11: note = Table B: HLA-DQA1*03:01-B1*03:02L
SELLTPLGIDL

SEQ ID NO: 24785 - protein, 10 aa, Severe acute respiratory syndrome coronavirus 2
  REGION 1..10: note = Table B: HLA-DQA1*03:01-B1*03:02L HLA-DPA1*01:02-B1*04:01L HLA-DQA1*01:03-B1*06:01L HLA-DQA1*02:01-B1*03:03L
ESGEFKLASH

SEQ ID NO: 24786 - protein, 12 aa, Severe acute respiratory syndrome coronavirus 2
  REGION 1..12: note = Table B: HLA-DQA1*03:01-B1*03:02L
EPSTQYEYGTED

SEQ ID NO: 24787 - protein, 14 aa, Severe acute respiratory syndrome coronavirus 2
  REGION 1..14: note = Table B: HLA-DQA1*03:01-B1*03:02L
PSTQYEYGTEDDYQ

SEQ ID NO: 24788 - protein, 10 aa, Severe acute respiratory syndrome coronavirus 2
  REGION 1..10: note = Table B: HLA-DQA1*03:01-B1*03:02L HLA-DQA1*01:03-B1*06:01L HLA-DQA1*02:01-B1*03:03L
DYQGKPLEFG

SEQ ID NO: 24789 - protein, 14 aa, Severe acute respiratory syndrome coronavirus 2
  REGION 1..14: note = Table B: HLA-DQA1*03:01-B1*03:02L
YQGKPLEFGATSAA

SEQ ID NO: 24790 - protein, 11 aa, Severe acute respiratory syndrome coronavirus 2
  REGION 1..11: note = Table B: HLA-DQA1*03:01-B1*03:02L HLA-DQA1*02:01-B1*03:03L
GATSAALQPEE

SEQ ID NO: 24791 - protein, 13 aa, Severe acute respiratory syndrome coronavirus 2
  REGION 1..13: note = Table B: HLA-DQA1*03:01-B1*03:02L HLA-DRB1*16:01L
EEQEEDWLDDDSQ

SEQ ID NO: 24792 - protein, 13 aa, Severe acute respiratory syndrome coronavirus 2
  REGION 1..13: note = Table B: HLA-DQA1*03:01-B1*03:02L
EQEEDWLDDDSQQ

SEQ ID NO: 24793 - protein, 11 aa, Severe acute respiratory syndrome coronavirus 2
  REGION 1..11: note = Table B: HLA-DQA1*03:01-B1*03:02L HLA-DQA1*02:01-B1*03:03L
DSQQTVGQQDG

SEQ ID NO: 24794 - protein, 12 aa, Severe acute respiratory syndrome coronavirus 2
  REGION 1..12: note = Table B: HLA-DQA1*03:01-B1*03:02L
SQQTVGQQDGSE

SEQ ID NO: 24795 - protein, 12 aa, Severe acute respiratory syndrome coronavirus 2
  REGION 1..12: note = Table B: HLA-DQA1*03:01-B1*03:02L
QTVGQQDGSEDN

SEQ ID NO: 24796 - protein, 13 aa, Severe acute respiratory syndrome coronavirus 2
  REGION 1..13: note = Table B: HLA-DQA1*03:01-B1*03:02L
DGSEDNQTTTIQT

SEQ ID NO: 24797 - protein, 10 aa, Severe acute respiratory syndrome coronavirus 2
  REGION 1..10: note = Table B: HLA-DQA1*03:01-B1*03:02L
IQTIVEVQPQ

SEQ ID NO: 24798 - protein, 10 aa, Severe acute respiratory syndrome coronavirus 2
  REGION 1..10: note = Table B: HLA-DQA1*03:01-B1*03:02L HLA-DQA1*01:03-B1*06:01L HLA-DQA1*02:01-B1*03:03L
ELTPVVQTIE

SEQ ID NO: 24799 - protein, 10 aa, Severe acute respiratory syndrome coronavirus 2
  REGION 1..10: note = Table B: HLA-DQA1*03:01-B1*03:02L
TPVVQTIEVN

SEQ ID NO: 24800 - protein, 10 aa, Severe acute respiratory syndrome coronavirus 2
  REGION 1..10: note = Table B: HLA-DQA1*03:01-B1*03:02L HLA-DQA1*02:01-B1*03:03L
KNADIVEEAK

SEQ ID NO: 24801 - protein, 10 aa, Severe acute respiratory syndrome coronavirus 2
  REGION 1..10: note = Table B: HLA-DQA1*03:01-B1*03:02L HLA-DQA1*02:01-B1*03:03L
NADIVEEAKK

SEQ ID NO: 24802 - protein, 10 aa, Severe acute respiratory syndrome coronavirus 2
  REGION 1..10: note = Table B: HLA-DQA1*03:01-B1*03:02L
DIVEEAKKVK

SEQ ID NO: 24803 - protein, 10 aa, Severe acute respiratory syndrome coronavirus 2
  REGION 1..10: note = Table B: HLA-DQA1*03:01-B1*03:02L
VEEAKKVKPT

SEQ ID NO: 24804 - protein, 11 aa, Severe acute respiratory syndrome coronavirus 2
  REGION 1..11: note = Table B: HLA-DQA1*03:01-B1*03:02L HLA-DQA1*02:01-B1*03:03L
AANVYLKHGGG

SEQ ID NO: 24805 - protein, 10 aa, Severe acute respiratory syndrome coronavirus 2
  REGION 1..10: note = Table B: HLA-DQA1*03:01-B1*03:02L HLA-DQA1*01:03-B1*06:01L HLA-DQA1*02:01-B1*03:03L
GVAGALNKAT

SEQ ID NO: 24806 - protein, 11 aa, Severe acute respiratory syndrome coronavirus 2
  REGION 1..11: note = Table B: HLA-DQA1*03:01-B1*03:02L HLA-DQA1*01:03-B1*06:01L HLA-DQA1*02:01-B1*03:03L
TNNAMQVESDD

SEQ ID NO: 24807 - protein, 13 aa, Severe acute respiratory syndrome coronavirus 2
  REGION 1..13: note = Table B: HLA-DQA1*03:01-B1*03:02L HLA-DRB1*16:01L
AMQVESDDYIATN

SEQ ID NO: 24808 - protein, 10 aa, Severe acute respiratory syndrome coronavirus 2
  REGION 1..10: note = Table B: HLA-DQA1*03:01-B1*03:02L HLA-DQA1*02:01-B1*03:03L
HVVGPNVNKG

SEQ ID NO: 24809 - protein, 10 aa, Severe acute respiratory syndrome coronavirus 2
  REGION 1..10: note = Table B: HLA-DQA1*03:01-B1*03:02L
VGPNVNKGED

SEQ ID NO: 24810 - protein, 10 aa, Severe acute respiratory syndrome coronavirus 2
  REGION 1..10: note = Table B: HLA-DQA1*03:01-B1*03:02L
PNVNKGEDIQ

SEQ ID NO: 24811 - protein, 11 aa, Severe acute respiratory syndrome coronavirus 2
  REGION 1..11: note = Table B: HLA-DQA1*03:01-B1*03:02L HLA-DQA1*01:03-B1*06:01L HLA-DQA1*02:01-B1*03:03L
LKSAYENFNQH

SEQ ID NO: 24812 - protein, 10 aa, Severe acute respiratory syndrome coronavirus 2
  REGION 1..10: note = Table B: HLA-DQA1*03:01-B1*03:02L HLA-DQA1*02:01-B1*03:03L
AGIFGADPIH

SEQ ID NO: 24813 - protein, 10 aa, Severe acute respiratory syndrome coronavirus 2
  REGION 1..10: note = Table B: HLA-DQA1*03:01-B1*03:02L HLA-DQA1*01:03-B1*06:01L HLA-DQA1*02:01-B1*03:03L
TNVYLAVFDK

SEQ ID NO: 24814 - protein, 10 aa, Severe acute respiratory syndrome coronavirus 2
  REGION 1..10: note = Table B: HLA-DQA1*03:01-B1*03:02L
MKSEKQVEQK

SEQ ID NO: 24815 - protein, 10 aa, Severe acute respiratory syndrome coronavirus 2
  REGION 1..10: note = Table B: HLA-DQA1*03:01-B1*03:02L
VEQKIAEIPK

SEQ ID NO: 24816 - protein, 10 aa, Severe acute respiratory syndrome coronavirus 2
  REGION 1..10: note = Table B: HLA-DQA1*03:01-B1*03:02L
QKIAEIPKEE

SEQ ID NO: 24817 - protein, 11 aa, Severe acute respiratory syndrome coronavirus 2
  REGION 1..11: note = Table B: HLA-DQA1*03:01-B1*03:02L
IPKEEVKPFIT

SEQ ID NO: 24818 - protein, 10 aa, Severe acute respiratory syndrome coronavirus 2
  REGION 1..10: note = Table B: HLA-DQA1*03:01-B1*03:02L
PSVEQRKQDD

SEQ ID NO: 24819 - protein, 11 aa, Severe acute respiratory syndrome coronavirus 2
  REGION 1..11: note = Table B: HLA-DQA1*03:01-B1*03:02L
INGNLHPDSAT

SEQ ID NO: 24820 - protein, 10 aa, Severe acute respiratory syndrome coronavirus 2
  REGION 1..10: note = Table B: HLA-DQA1*03:01-B1*03:02L HLA-DRB1*14:17L HLA-DQA1*02:01-B1*03:03L
AVVIPTKKAG

SEQ ID NO: 24821 - protein, 10 aa, Severe acute respiratory syndrome coronavirus 2
  REGION 1..10: note = Table B: HLA-DQA1*03:01-B1*03:02L HLA-DQA1*01:03-B1*06:01L HLA-DQA1*02:01-B1*03:03L
AGGTTEMLAK

SEQ ID NO: 24822 - protein, 10 aa, Severe acute respiratory syndrome coronavirus 2
  REGION 1..10: note = Table B: HLA-DQA1*03:01-B1*03:02L
GGTTEMLAKA

SEQ ID NO: 24823 - protein, 10 aa, Severe acute respiratory syndrome coronavirus 2
  REGION 1..10: note = Table B: HLA-DQA1*03:01-B1*03:02L HLA-DQA1*01:03-B1*06:01L HLA-DQA1*02:01-B1*03:03L
TTEMLAKALR

SEQ ID NO: 24824 - protein, 11 aa, Severe acute respiratory syndrome coronavirus 2
  REGION 1..11: note = Table B: HLA-DQA1*03:01-B1*03:02L
AKALRKVPTDN

SEQ ID NO: 24825 - protein, 12 aa, Severe acute respiratory syndrome coronavirus 2
  REGION 1..12: note = Table B: HLA-DQA1*03:01-B1*03:02L
ALRKVPTDNYIT

SEQ ID NO: 24826 - protein, 13 aa, Severe acute respiratory syndrome coronavirus 2
  REGION 1..13: note = Table B: HLA-DQA1*03:01-B1*03:02L
KVPTDNYITTYPG

SEQ ID NO: 24827 - protein, 10 aa, Severe acute respiratory syndrome coronavirus 2
  REGION 1..10: note = Table B: HLA-DQA1*03:01-B1*03:02L
LPSIISNEKQ

SEQ ID NO: 24828 - protein, 12 aa, Severe acute respiratory syndrome coronavirus 2
  REGION 1..12: note = Table B: HLA-DQA1*03:01-B1*03:02L HLA-DQA1*02:01-B1*03:03L
NLREMLAHAEET

SEQ ID NO: 24829 - protein, 10 aa, Severe acute respiratory syndrome coronavirus 2
  REGION 1..10: note = Table B: HLA-DQA1*03:01-B1*03:02L
MLAHAEETRK

SEQ ID NO: 24830 - protein, 10 aa, Severe acute respiratory syndrome coronavirus 2
  REGION 1..10: note = Table B: HLA-DQA1*03:01-B1*03:02L HLA-DQA1*01:03-B1*06:01L HLA-DQA1*02:01-B1*03:03L
LAHAEETRKL

SEQ ID NO: 24831 - protein, 10 aa, Severe acute respiratory syndrome coronavirus 2
  REGION 1..10: note = Table B: HLA-DQA1*03:01-B1*03:02L
KLMPVCVETK

SEQ ID NO: 24832 - protein, 10 aa, Severe acute respiratory syndrome coronavirus 2
  REGION 1..10: note = Table B: HLA-DQA1*03:01-B1*03:02L
KAIVSTIQRK

SEQ ID NO: 24833 - protein, 11 aa, Severe acute respiratory syndrome coronavirus 2
  REGION 1..11: note = Table B: HLA-DQA1*03:01-B1*03:02L HLA-DQA1*02:01-B1*03:03L
SKTTVASLINT

SEQ ID NO: 24834 - protein, 10 aa, Severe acute respiratory syndrome coronavirus 2
  REGION 1..10: note = Table B: HLA-DQA1*03:01-B1*03:02L HLA-DQA1*01:03-B1*06:01L HLA-DQA1*02:01-B1*03:03L
HGLNLEEAAR

SEQ ID NO: 24835 - protein, 11 aa, Severe acute respiratory syndrome coronavirus 2
  REGION 1..11: note = Table B: HLA-DQA1*03:01-B1*03:02L
GLNLEEAARYM

SEQ ID NO: 24836 - protein, 11 aa, Severe acute respiratory syndrome coronavirus 2
  REGION 1..11: note = Table B: HLA-DQA1*03:01-B1*03:02L
VPATVSVSSPD

SEQ ID NO: 24837 - protein, 13 aa, Severe acute respiratory syndrome coronavirus 2
  REGION 1..13: note = Table B: HLA-DQA1*03:01-B1*03:02L
PATVSVSSPDAVT

SEQ ID NO: 24838 - protein, 12 aa, Severe acute respiratory syndrome coronavirus 2
  REGION 1..12: note = Table B: HLA-DQA1*03:01-B1*03:02L
SVSSPDAVTAYN

SEQ ID NO: 24839 - protein, 12 aa, Severe acute respiratory syndrome coronavirus 2
  REGION 1..12: note = Table B: HLA-DQA1*03:01-B1*03:02L
VSSPDAVTAYNG

SEQ ID NO: 24840 - protein, 10 aa, Severe acute respiratory syndrome coronavirus 2
  REGION 1..10: note = Table B: HLA-DQA1*03:01-B1*03:02L HLA-DQA1*05:05-B1*03:01L HLA-DQA1*01:03-B1*06:01L HLA-DQA1*02:01-B1*03:03L
TSSSKTPEEH

SEQ ID NO: 24841 - protein, 12 aa, Severe acute respiratory syndrome coronavirus 2
  REGION 1..12: note = Table B: HLA-DQA1*03:01-B1*03:02L
SSKTPEEHFIET

SEQ ID NO: 24842 - protein, 11 aa, Severe acute respiratory syndrome coronavirus 2
  REGION 1..11: note = Table B: HLA-DQA1*03:01-B1*03:02L
GQSTQLGIEFL

SEQ ID NO: 24843 - protein, 10 aa, Severe acute respiratory syndrome coronavirus 2
  REGION 1..10: note = Table B: HLA-DQA1*03:01-B1*03:02L HLA-DQA1*05:05-B1*03:01L HLA-DQA1*01:03-B1*06:01L HLA-DQA1*02:01-B1*03:03L
STQLGIEFLK

SEQ ID NO: 24844 - protein, 10 aa, Severe acute respiratory syndrome coronavirus 2
  REGION 1..10: note = Table B: HLA-DQA1*03:01-B1*03:02L
TQLGIEFLKR

SEQ ID NO: 24845 - protein, 10 aa, Severe acute respiratory syndrome coronavirus 2
  REGION 1..10: note = Table B: HLA-DQA1*03:01-B1*03:02L HLA-DPA1*01:02-B1*04:01L
IEFLKRGDKS

SEQ ID NO: 24846 - protein, 13 aa, Severe acute respiratory syndrome coronavirus 2
  REGION 1..13: note = Table B: HLA-DQA1*03:01-B1*03:02L
RGDKSVYYTSNPT

SEQ ID NO: 24847 - protein, 11 aa, Severe acute respiratory syndrome coronavirus 2
  REGION 1..11: note = Table B: HLA-DQA1*03:01-B1*03:02L
TSNPTTFHLDG

SEQ ID NO: 24848 - protein, 11 aa, Severe acute respiratory syndrome coronavirus 2
  REGION 1..11: note = Table B: HLA-DQA1*03:01-B1*03:02L
HLDGEVITFDN

SEQ ID NO: 24849 - protein, 10 aa, Severe acute respiratory syndrome coronavirus 2
  REGION 1..10: note = Table B: HLA-DQA1*03:01-B1*03:02L
KVFTTVDNIN

SEQ ID NO: 24850 - protein, 10 aa, Severe acute respiratory syndrome coronavirus 2
  REGION 1..10: note = Table B: HLA-DQA1*03:01-B1*03:02L HLA-DQA1*01:03-B1*06:01L HLA-DQA1*02:01-B1*03:03L
DGADVTKIKP

SEQ ID NO: 24851 - protein, 10 aa, Severe acute respiratory syndrome coronavirus 2
  REGION 1..10: note = Table B: HLA-DQA1*03:01-B1*03:02L
GADVTKIKPH

SEQ ID NO: 24852 - protein, 10 aa, Severe acute respiratory syndrome coronavirus 2
  REGION 1..10: note = Table B: HLA-DQA1*03:01-B1*03:02L HLA-DQA1*02:01-B1*03:03L
ADVTKIKPHN

SEQ ID NO: 24853 - protein, 11 aa, Severe acute respiratory syndrome coronavirus 2
  REGION 1..11: note = Table B: HLA-DQA1*03:01-B1*03:02L HLA-DQA1*02:01-B1*03:03L
DVTKIKPHNSH

SEQ ID NO: 24854 - protein, 11 aa, Severe acute respiratory syndrome coronavirus 2
  REGION 1..11: note = Table B: HLA-DQA1*03:01-B1*03:02L
KIKPHNSHEGK

SEQ ID NO: 24855 - protein, 11 aa, Severe acute respiratory syndrome coronavirus 2
  REGION 1..11: note = Table B: HLA-DQA1*03:01-B1*03:02L
GKTFYVLPNDD

SEQ ID NO: 24856 - protein, 11 aa, Severe acute respiratory syndrome coronavirus 2
  REGION 1..11: note = Table B: HLA-DQA1*03:01-B1*03:02L
NPPALQDAYYR

SEQ ID NO: 24857 - protein, 11 aa, Severe acute respiratory syndrome coronavirus 2
  REGION 1..11: note = Table B: HLA-DQA1*03:01-B1*03:02L HLA-DRB1*16:01L HLA-DQA1*02:01-B1*03:03L
DAYYRARAGEA

SEQ ID NO: 24858 - protein, 11 aa, Severe acute respiratory syndrome coronavirus 2
  REGION 1..11: note = Table B: HLA-DQA1*03:01-B1*03:02L HLA-DRB1*16:01L
AYYRARAGEAA

SEQ ID NO: 24859 - protein, 11 aa, Severe acute respiratory syndrome coronavirus 2
  REGION 1..11: note = Table B: HLA-DQA1*03:01-B1*03:02L HLA-DQA1*02:01-B1*03:03L
PFVMMSAPPAQ

SEQ ID NO: 24860 - protein, 10 aa, Severe acute respiratory syndrome coronavirus 2
  REGION 1..10: note = Table B: HLA-DQA1*03:01-B1*03:02L
SAPPAQYELK

SEQ ID NO: 24861 - protein, 11 aa, Severe acute respiratory syndrome coronavirus 2
  REGION 1..11: note = Table B: HLA-DQA1*03:01-B1*03:02L
APPAQYELKHG

SEQ ID NO: 24862 - protein, 11 aa, Severe acute respiratory syndrome coronavirus 2
  REGION 1..11: note = Table B: HLA-DQA1*03:01-B1*03:02L
TKSSEYKGPIT

SEQ ID NO: 24863 - protein, 10 aa, Severe acute respiratory syndrome coronavirus 2
  REGION 1..10: note = Table B: HLA-DQA1*03:01-B1*03:02L HLA-DQA1*01:03-B1*06:01L HLA-DQA1*02:01-B1*03:03L
ENSYTTTIKP

SEQ ID NO: 24864 - protein, 11 aa, Severe acute respiratory syndrome coronavirus 2
  REGION 1..11: note = Table B: HLA-DQA1*03:01-B1*03:02L
TIKPVTYKLDG

SEQ ID NO: 24865 - protein, 11 aa, Severe acute respiratory syndrome coronavirus 2
  REGION 1..11: note = Table B: HLA-DQA1*03:01-B1*03:02L HLA-DQA1*02:01-B1*03:03L
DGVVCTEIDPK

SEQ ID NO: 24866 - protein, 11 aa, Severe acute respiratory syndrome coronavirus 2
  REGION 1..11: note = Table B: HLA-DQA1*03:01-B1*03:02L
PYPNASFDNFK

SEQ ID NO: 24867 - protein, 11 aa, Severe acute respiratory syndrome coronavirus 2
  REGION 1..11: note = Table B: HLA-DQA1*03:01-B1*03:02L
DNFKFVCDNIK

SEQ ID NO: 24868 - protein, 12 aa, Severe acute respiratory syndrome coronavirus 2
  REGION 1..12: note = Table B: HLA-DQA1*03:01-B1*03:02L
FADDLNQLTGYK

SEQ ID NO: 24869 - protein, 10 aa, Severe acute respiratory syndrome coronavirus 2
  REGION 1..10: note = Table B: HLA-DQA1*03:01-B1*03:02L
DLNQLTGYKK

SEQ ID NO: 24870 - protein, 10 aa, Severe acute respiratory syndrome coronavirus 2
  REGION 1..10: note = Table B: HLA-DQA1*03:01-B1*03:02L
DYKHYTPSFK

SEQ ID NO: 24871 - protein, 10 aa, Severe acute respiratory syndrome coronavirus 2
  REGION 1..10: note = Table B: HLA-DQA1*03:01-B1*03:02L
VWHVNNATNK

SEQ ID NO: 24872 - protein, 11 aa, Severe acute respiratory syndrome coronavirus 2
  REGION 1..11: note = Table B: HLA-DQA1*03:01-B1*03:02L
ATYKPNTWCIR

SEQ ID NO: 24873 - protein, 10 aa, Severe acute respiratory syndrome coronavirus 2
  REGION 1..10: note = Table B: HLA-DQA1*03:01-B1*03:02L HLA-DQA1*01:03-B1*06:01L HLA-DQA1*02:01-B1*03:03L
NSFDVLKSED

SEQ ID NO: 24874 - protein, 10 aa, Severe acute respiratory syndrome coronavirus 2
  REGION 1..10: note = Table B: HLA-DQA1*03:01-B1*03:02L HLA-DQA1*01:03-B1*06:01L HLA-DQA1*02:01-B1*03:03L
VGDIILKPAN

SEQ ID NO: 24875 - protein, 10 aa, Severe acute respiratory syndrome coronavirus 2
  REGION 1..10: note = Table B: HLA-DQA1*03:01-B1*03:02L
GDIILKPANN

SEQ ID NO: 24876 - protein, 10 aa, Severe acute respiratory syndrome coronavirus 2
  REGION 1..10: note = Table B: HLA-DQA1*03:01-B1*03:02L HLA-DQA1*01:03-B1*06:01L HLA-DQA1*02:01-B1*03:03L
NSLKITEEVG

SEQ ID NO: 24877 - protein, 11 aa, Severe acute respiratory syndrome coronavirus 2
  REGION 1..11: note = Table B: HLA-DQA1*03:01-B1*03:02L HLA-DQA1*01:03-B1*06:01L HLA-DQA1*02:01-B1*03:03L
VDNSSLTIKKP

SEQ ID NO: 24878 - protein, 10 aa, Severe acute respiratory syndrome coronavirus 2
  REGION 1..10: note = Table B: HLA-DQA1*03:01-B1*03:02L HLA-DQA1*02:01-B1*03:03L
SLTIKKPNEL

SEQ ID NO: 24879 - protein, 10 aa, Severe acute respiratory syndrome coronavirus 2
  REGION 1..10: note = Table B: HLA-DQA1*03:01-B1*03:02L
AAVNSVPWDT

SEQ ID NO: 24880 - protein, 11 aa, Severe acute respiratory syndrome coronavirus 2
  REGION 1..11: note = Table B: HLA-DQA1*03:01-B1*03:02L
VPWDTIANYAK

SEQ ID NO: 24881 - protein, 10 aa, Severe acute respiratory syndrome coronavirus 2
  REGION 1..10: note = Table B: HLA-DQA1*03:01-B1*03:02L
AKNTVKSVGK

SEQ ID NO: 24882 - protein, 10 aa, Severe acute respiratory syndrome coronavirus 2
  REGION 1..10: note = Table B: HLA-DQA1*03:01-B1*03:02L HLA-DQA1*02:01-B1*03:03L
MAPISAMVRM

SEQ ID NO: 24883 - protein, 11 aa, Severe acute respiratory syndrome coronavirus 2
  REGION 1..11: note = Table B: HLA-DQA1*03:01-B1*03:02L
RSFYVYANGGK

SEQ ID NO: 24884 - protein, 14 aa, Severe acute respiratory syndrome coronavirus 2
  REGION 1..14: note = Table B: HLA-DQA1*03:01-B1*03:02L
PINPTDQSSYIVDS

SEQ ID NO: 24885 - protein, 10 aa, Severe acute respiratory syndrome coronavirus 2
  REGION 1..10: note = Table B: HLA-DQA1*03:01-B1*03:02L
HLYFDKAGQK

SEQ ID NO: 24886 - protein, 10 aa, Severe acute respiratory syndrome coronavirus 2
  REGION 1..10: note = Table B: HLA-DQA1*03:01-B1*03:02L
DKAGQKTYER

SEQ ID NO: 24887 - protein, 10 aa, Severe acute respiratory syndrome coronavirus 2
  REGION 1..10: note = Table B: HLA-DQA1*03:01-B1*03:02L
GQKTYERHSL

SEQ ID NO: 24888 - protein, 10 aa, Severe acute respiratory syndrome coronavirus 2
  REGION 1..10: note = Table B: HLA-DQA1*03:01-B1*03:02L HLA-DRB1*16:01L
RHSLSHFVNL

SEQ ID NO: 24889 - protein, 10 aa, Severe acute respiratory syndrome coronavirus 2
  REGION 1..10: note = Table B: HLA-DQA1*03:01-B1*03:02L
SHFVNLDNLR

SEQ ID NO: 24890 - protein, 10 aa, Severe acute respiratory syndrome coronavirus 2
  REGION 1..10: note = Table B: HLA-DQA1*03:01-B1*03:02L
NNTKGSLPIN

SEQ ID NO: 24891 - protein, 11 aa, Severe acute respiratory syndrome coronavirus 2
  REGION 1..11: note = Table B: HLA-DQA1*03:01-B1*03:02L HLA-DQA1*02:01-B1*03:03L
LPINVIVFDGK

SEQ ID NO: 24892 - protein, 11 aa, Severe acute respiratory syndrome coronavirus 2
  REGION 1..11: note = Table B: HLA-DQA1*03:01-B1*03:02L
DQALVSDVGDS

SEQ ID NO: 24893 - protein, 11 aa, Severe acute respiratory syndrome coronavirus 2
  REGION 1..11: note = Table B: HLA-DQA1*03:01-B1*03:02L
DSAEVAVKMFD

SEQ ID NO: 24894 - protein, 10 aa, Severe acute respiratory syndrome coronavirus 2
  REGION 1..10: note = Table B: HLA-DQA1*03:01-B1*03:02L HLA-DQA1*01:03-B1*06:01L HLA-DQA1*02:01-B1*03:03L
TFNVPMEKLK

SEQ ID NO: 24895 - protein, 10 aa, Severe acute respiratory syndrome coronavirus 2
  REGION 1..10: note = Table B: HLA-DQA1*03:01-B1*03:02L
AARQGFVDSD

SEQ ID NO: 24896 - protein, 10 aa, Severe acute respiratory syndrome coronavirus 2
  REGION 1..10: note = Table B: HLA-DQA1*03:01-B1*03:02L
ETKDVVECLK

SEQ ID NO: 24897 - protein, 10 aa, Severe acute respiratory syndrome coronavirus 2
  REGION 1..10: note = Table B: HLA-DQA1*03:01-B1*03:02L
SHQSDIEVTG

SEQ ID NO: 24898 - protein, 10 aa, Severe acute respiratory syndrome coronavirus 2
  REGION 1..10: note = Table B: HLA-DQA1*03:01-B1*03:02L HLA-DQA1*02:01-B1*03:03L
NKVENMTPRD

SEQ ID NO: 24899 - protein, 10 aa, Severe acute respiratory syndrome coronavirus 2
  REGION 1..10: note = Table B: HLA-DQA1*03:01-B1*03:02L
KVENMTPRDL

SEQ ID NO: 24900 - protein, 10 aa, Severe acute respiratory syndrome coronavirus 2
  REGION 1..10: note = Table B: HLA-DQA1*03:01-B1*03:02L
ARHINAQVAK

SEQ ID NO: 24901 - protein, 10 aa, Severe acute respiratory syndrome coronavirus 2
  REGION 1..10: note = Table B: HLA-DQA1*03:01-B1*03:02L HLA-DQA1*02:01-B1*03:03L
HINAQVAKSH

SEQ ID NO: 24902 - protein, 10 aa, Severe acute respiratory syndrome coronavirus 2
  REGION 1..10: note = Table B: HLA-DQA1*03:01-B1*03:02L HLA-DQA1*05:05-B1*03:01L HLA-DQA1*01:03-B1*06:01L HLA-DQA1*02:01-B1*03:03L
DFMSLSEQLR

SEQ ID NO: 24903 - protein, 10 aa, Severe acute respiratory syndrome coronavirus 2
  REGION 1..10: note = Table B: HLA-DQA1*03:01-B1*03:02L
NVVTTKIALK

SEQ ID NO: 24904 - protein, 10 aa, Severe acute respiratory syndrome coronavirus 2
  REGION 1..10: note = Table B: HLA-DQA1*03:01-B1*03:02L
TTKIALKGGK

SEQ ID NO: 24905 - protein, 10 aa, Severe acute respiratory syndrome coronavirus 2
  REGION 1..10: note = Table B: HLA-DQA1*03:01-B1*03:02L
AIFYLITPVH

SEQ ID NO: 24906 - protein, 13 aa, Severe acute respiratory syndrome coronavirus 2
  REGION 1..13: note = Table B: HLA-DQA1*03:01-B1*03:02L HLA-DQA1*02:01-B1*03:03L
TDTCFANKHADFD

SEQ ID NO: 24907 - protein, 13 aa, Severe acute respiratory syndrome coronavirus 2
  REGION 1..13: note = Table B: HLA-DQA1*03:01-B1*03:02L
KHADFDTWFSQRG

SEQ ID NO: 24908 - protein, 11 aa, Severe acute respiratory syndrome coronavirus 2
  REGION 1..11: note = Table B: HLA-DQA1*03:01-B1*03:02L
SQRGGSYTNDK

SEQ ID NO: 24909 - protein, 12 aa, Severe acute respiratory syndrome coronavirus 2
  REGION 1..12: note = Table B: HLA-DQA1*03:01-B1*03:02L HLA-DQA1*02:01-B1*03:03L
TTNGDFLHFLPR

SEQ ID NO: 24910 - protein, 11 aa, Severe acute respiratory syndrome coronavirus 2
  REGION 1..11: note = Table B: HLA-DQA1*03:01-B1*03:02L HLA-DQA1*02:01-B1*03:03L
YDTNVLEGSVA

SEQ ID NO: 24911 - protein, 10 aa, Severe acute respiratory syndrome coronavirus 2
  REGION 1..10: note = Table B: HLA-DQA1*03:01-B1*03:02L HLA-DQA1*05:05-B1*03:01L HLA-DQA1*01:03-B1*06:01L HLA-DQA1*02:01-B1*03:03L
EGSVAYESLR

SEQ ID NO: 24912 - protein, 10 aa, Severe acute respiratory syndrome coronavirus 2
  REGION 1..10: note = Table B: HLA-DQA1*03:01-B1*03:02L
ESLRPDTRYV

SEQ ID NO: 24913 - protein, 11 aa, Severe acute respiratory syndrome coronavirus 2
  REGION 1..11: note = Table B: HLA-DQA1*03:01-B1*03:02L HLA-DQA1*01:03-B1*06:01L
EGSVRVVTTFD

SEQ ID NO: 24914 - protein, 10 aa, Severe acute respiratory syndrome coronavirus 2
  REGION 1..10: note = Table B: HLA-DQA1*03:01-B1*03:02L HLA-DPA1*01:02-B1*04:01L HLA-DRB1*16:01L HLA-DQA1*01:03-B1*06:01L HLA-DQA1*02:01-B1*03:03L
RAFGEYSHVV

SEQ ID NO: 24915 - protein, 10 aa, Severe acute respiratory syndrome coronavirus 2
  REGION 1..10: note = Table B: HLA-DQA1*03:01-B1*03:02L HLA-DPA1*01:02-B1*04:01L
RYLALYNKYK

SEQ ID NO: 24916 - protein, 10 aa, Severe acute respiratory syndrome coronavirus 2
  REGION 1..10: note = Table B: HLA-DQA1*03:01-B1*03:02L
LAKALNDFSN

SEQ ID NO: 24917 - protein, 10 aa, Severe acute respiratory syndrome coronavirus 2
  REGION 1..10: note = Table B: HLA-DQA1*03:01-B1*03:02L HLA-DQA1*01:03-B1*06:01L HLA-DQA1*02:01-B1*03:03L
SAVLQSGFRK

SEQ ID NO: 24918 - protein, 10 aa, Severe acute respiratory syndrome coronavirus 2
  REGION 1..10: note = Table B: HLA-DQA1*03:01-B1*03:02L
KMAFPSGKVE

SEQ ID NO: 24919 - protein, 10 aa, Severe acute respiratory syndrome coronavirus 2
  REGION 1..10: note = Table B: HLA-DQA1*03:01-B1*03:02L
PNYEDLLIRK

SEQ ID NO: 24920 - protein, 11 aa, Severe acute respiratory syndrome coronavirus 2
  REGION 1..11: note = Table B: HLA-DQA1*03:01-B1*03:02L HLA-DQA1*01:03-B1*06:01L HLA-DQA1*02:01-B1*03:03L
EDLLIRKSNHN

SEQ ID NO: 24921 - protein, 10 aa, Severe acute respiratory syndrome coronavirus 2
  REGION 1..10: note = Table B: HLA-DQA1*03:01-B1*03:02L HLA-DQA1*02:01-B1*03:03L
VQLRVIGHSM

SEQ ID NO: 24922 - protein, 10 aa, Severe acute respiratory syndrome coronavirus 2
  REGION 1..10: note = Table B: HLA-DQA1*03:01-B1*03:02L HLA-DRB1*14:17L
KLKVDTANPK

SEQ ID NO: 24923 - protein, 10 aa, Severe acute respiratory syndrome coronavirus 2
  REGION 1..10: note = Table B: HLA-DQA1*03:01-B1*03:02L
YMHHMELPTG

SEQ ID NO: 24924 - protein, 10 aa, Severe acute respiratory syndrome coronavirus 2
  REGION 1..10: note = Table B: HLA-DQA1*03:01-B1*03:02L
HHMELPTGVH

SEQ ID NO: 24925 - protein, 12 aa, Severe acute respiratory syndrome coronavirus 2
  REGION 1..12: note = Table B: HLA-DQA1*03:01-B1*03:02L
QAAGTDTTITVN

SEQ ID NO: 24926 - protein, 11 aa, Severe acute respiratory syndrome coronavirus 2
  REGION 1..11: note = Table B: HLA-DQA1*03:01-B1*03:02L HLA-DPA1*01:02-B1*04:01L HLA-DQA1*02:01-B1*03:03L
VINGDRWFLNR

SEQ ID NO: 24927 - protein, 11 aa, Severe acute respiratory syndrome coronavirus 2
  REGION 1..11: note = Table B: HLA-DQA1*03:01-B1*03:02L
NDFNLVAMKYN

SEQ ID NO: 24928 - protein, 10 aa, Severe acute respiratory syndrome coronavirus 2
  REGION 1..10: note = Table B: HLA-DQA1*03:01-B1*03:02L
DHVDILGPLS

SEQ ID NO: 24929 - protein, 11 aa, Severe acute respiratory syndrome coronavirus 2
  REGION 1..11: note = Table B: HLA-DQA1*03:01-B1*03:02L HLA-DQA1*02:01-B1*03:03L
DILGPLSAQTG

SEQ ID NO: 24930 - protein, 10 aa, Severe acute respiratory syndrome coronavirus 2
  REGION 1..10: note = Table B: HLA-DQA1*03:01-B1*03:02L HLA-DRB1*16:01L HLA-DQA1*02:01-B1*03:03L
VTFQSAVKRT

SEQ ID NO: 24931 - protein, 11 aa, Severe acute respiratory syndrome coronavirus 2
  REGION 1..11: note = Table B: HLA-DQA1*03:01-B1*03:02L HLA-DQA1*02:01-B1*03:03L
SAFAMMFVKHK

SEQ ID NO: 24932 - protein, 10 aa, Severe acute respiratory syndrome coronavirus 2
  REGION 1..10: note = Table B: HLA-DQA1*03:01-B1*03:02L
ARTVYDDGAR

SEQ ID NO: 24933 - protein, 10 aa, Severe acute respiratory syndrome coronavirus 2
  REGION 1..10: note = Table B: HLA-DQA1*03:01-B1*03:02L HLA-DQA1*01:03-B1*06:01L HLA-DQA1*02:01-B1*03:03L
DYLVSTQEFR

SEQ ID NO: 24934 - protein, 11 aa, Severe acute respiratory syndrome coronavirus 2
  REGION 1..11: note = Table B: HLA-DQA1*03:01-B1*03:02L
LPPKNSIDAFK

SEQ ID NO: 24935 - protein, 10 aa, Severe acute respiratory syndrome coronavirus 2
  REGION 1..10: note = Table B: HLA-DQA1*03:01-B1*03:02L HLA-DPA1*01:02-B1*04:01L
SIDAFKLNIK

SEQ ID NO: 24936 - protein, 11 aa, Severe acute respiratory syndrome coronavirus 2
  REGION 1..11: note = Table B: HLA-DQA1*03:01-B1*03:02L
NIKLLGVGGKP

SEQ ID NO: 24937 - protein, 10 aa, Severe acute respiratory syndrome coronavirus 2
  REGION 1..10: note = Table B: HLA-DQA1*03:01-B1*03:02L HLA-DQA1*01:03-B1*06:01L
VLLSVLQQLR

SEQ ID NO: 24938 - protein, 10 aa, Severe acute respiratory syndrome coronavirus 2
  REGION 1..10: note = Table B: HLA-DQA1*03:01-B1*03:02L
QQLRVESSSK

SEQ ID NO: 24939 - protein, 10 aa, Severe acute respiratory syndrome coronavirus 2
  REGION 1..10: note = Table B: HLA-DQA1*03:01-B1*03:02L
QLRVESSSKL

SEQ ID NO: 24940 - protein, 10 aa, Severe acute respiratory syndrome coronavirus 2
  REGION 1..10: note = Table B: HLA-DQA1*03:01-B1*03:02L
QLHNDILLAK

SEQ ID NO: 24941 - protein, 10 aa, Severe acute respiratory syndrome coronavirus 2
  REGION 1..10: note = Table B: HLA-DQA1*03:01-B1*03:02L
AKDTTEAFEK

SEQ ID NO: 24942 - protein, 10 aa, Severe acute respiratory syndrome coronavirus 2
  REGION 1..10: note = Table B: HLA-DQA1*03:01-B1*03:02L
KLCEEMLDNR

SEQ ID NO: 24943 - protein, 11 aa, Severe acute respiratory syndrome coronavirus 2
  REGION 1..11: note = Table B: HLA-DQA1*03:01-B1*03:02L HLA-DQA1*01:03-B1*06:01L HLA-DQA1*02:01-B1*03:03L
DNRATLQAIAS

SEQ ID NO: 24944 - protein, 10 aa, Severe acute respiratory syndrome coronavirus 2
  REGION 1..10: note = Table B: HLA-DQA1*03:01-B1*03:02L HLA-DQA1*01:03-B1*06:01L HLA-DQA1*02:01-B1*03:03L
ATAQEAYEQA

SEQ ID NO: 24945 - protein, 10 aa, Severe acute respiratory syndrome coronavirus 2
  REGION 1..10: note = Table B: HLA-DQA1*03:01-B1*03:02L HLA-DQA1*02:01-B1*03:03L
NGDSEVVLKK

SEQ ID NO: 24946 - protein, 10 aa, Severe acute respiratory syndrome coronavirus 2
  REGION 1..10: note = Table B: HLA-DQA1*03:01-B1*03:02L
DSEVVLKKLK

SEQ ID NO: 24947 - protein, 10 aa, Severe acute respiratory syndrome coronavirus 2
  REGION 1..10: note = Table B: HLA-DQA1*03:01-B1*03:02L
KLKKSLNVAK

SEQ ID NO: 24948 - protein, 10 aa, Severe acute respiratory syndrome coronavirus 2
  REGION 1..10: note = Table B: HLA-DQA1*03:01-B1*03:02L HLA-DQA1*02:01-B1*03:03L
SLNVAKSEFD

SEQ ID NO: 24949 - protein, 10 aa, Severe acute respiratory syndrome coronavirus 2
  REGION 1..10: note = Table B: HLA-DQA1*03:01-B1*03:02L HLA-DQA1*01:03-B1*06:01L HLA-DQA1*02:01-B1*03:03L
NVAKSEFDRD

SEQ ID NO: 24950 - protein, 11 aa, Severe acute respiratory syndrome coronavirus 2
  REGION 1..11: note = Table B: HLA-DQA1*03:01-B1*03:02L
MADQAMTQMYK

SEQ ID NO: 24951 - protein, 10 aa, Severe acute respiratory syndrome coronavirus 2
  REGION 1..10: note = Table B: HLA-DQA1*03:01-B1*03:02L
AMTQMYKQAR

SEQ ID NO: 24952 - protein, 11 aa, Severe acute respiratory syndrome coronavirus 2
  REGION 1..11: note = Table B: HLA-DQA1*03:01-B1*03:02L HLA-DQA1*02:01-B1*03:03L
DKRAKVTSAMQ

SEQ ID NO: 24953 - protein, 10 aa, Severe acute respiratory syndrome coronavirus 2
  REGION 1..10: note = Table B: HLA-DQA1*03:01-B1*03:02L
QTMLFTMLRK

SEQ ID NO: 24954 - protein, 10 aa, Severe acute respiratory syndrome coronavirus 2
  REGION 1..10: note = Table B: HLA-DQA1*03:01-B1*03:02L
NDALNNIINN

SEQ ID NO: 24955 - protein, 11 aa, Severe acute respiratory syndrome coronavirus 2
  REGION 1..11: note = Table B: HLA-DQA1*03:01-B1*03:02L
SALWEIQQVVD

SEQ ID NO: 24956 - protein, 11 aa, Severe acute respiratory syndrome coronavirus 2
  REGION 1..11: note = Table B: HLA-DQA1*03:01-B1*03:02L HLA-DQA1*01:03-B1*06:01L HLA-DQA1*02:01-B1*03:03L
DADSKIVQLSE

SEQ ID NO: 24957 - protein, 10 aa, Severe acute respiratory syndrome coronavirus 2
  REGION 1..10: note = Table B: HLA-DQA1*03:01-B1*03:02L
AWPLIVTALR

SEQ ID NO: 24958 - protein, 11 aa, Severe acute respiratory syndrome coronavirus 2
  REGION 1..11: note = Table B: HLA-DQA1*03:01-B1*03:02L
KLQNNELSPVA

SEQ ID NO: 24959 - protein, 10 aa, Severe acute respiratory syndrome coronavirus 2
  REGION 1..10: note = Table B: HLA-DQA1*03:01-B1*03:02L HLA-DQA1*02:01-B1*03:03L
NNELSPVALR

SEQ ID NO: 24960 - protein, 14 aa, Severe acute respiratory syndrome coronavirus 2
  REGION 1..14: note = Table B: HLA-DQA1*03:01-B1*03:02L
GTTQTACTDDNALA

SEQ ID NO: 24961 - protein, 12 aa, Severe acute respiratory syndrome coronavirus 2
  REGION 1..12: note = Table B: HLA-DQA1*03:01-B1*03:02L
FPKSDGTGTIYT

SEQ ID NO: 24962 - protein, 10 aa, Severe acute respiratory syndrome coronavirus 2
  REGION 1..10: note = Table B: HLA-DQA1*03:01-B1*03:02L
TDTPKGPKVK

SEQ ID NO: 24963 - protein, 10 aa, Severe acute respiratory syndrome coronavirus 2
  REGION 1..10: note = Table B: HLA-DQA1*03:01-B1*03:02L HLA-DQA1*01:03-B1*06:01L HLA-DQA1*02:01-B1*03:03L
GSLAATVRLQ

SEQ ID NO: 24964 - protein, 10 aa, Severe acute respiratory syndrome coronavirus 2
  REGION 1..10: note = Table B: HLA-DQA1*03:01-B1*03:02L
AGNATEVPAN

SEQ ID NO: 24965 - protein, 11 aa, Severe acute respiratory syndrome coronavirus 2
  REGION 1..11: note = Table B: HLA-DQA1*03:01-B1*03:02L
GNATEVPANST

SEQ ID NO: 24966 - protein, 10 aa, Severe acute respiratory syndrome coronavirus 2
  REGION 1..10: note = Table B: HLA-DQA1*03:01-B1*03:02L
GGQPITNCVK

SEQ ID NO: 24967 - protein, 10 aa, Severe acute respiratory syndrome coronavirus 2
  REGION 1..10: note = Table B: HLA-DQA1*03:01-B1*03:02L
TVTPEANMDQ

SEQ ID NO: 24968 - protein, 11 aa, Severe acute respiratory syndrome coronavirus 2
  REGION 1..11: note = Table B: HLA-DQA1*03:01-B1*03:02L
REPMLQSADAQ

SEQ ID NO: 24969 - protein, 10 aa, Severe acute respiratory syndrome coronavirus 2
  REGION 1..10: note = Table B: HLA-DQA1*03:01-B1*03:02L HLA-DQA1*01:03-B1*06:01L HLA-DQA1*02:01-B1*03:03L
STDVVYRAFD

SEQ ID NO: 24970 - protein, 10 aa, Severe acute respiratory syndrome coronavirus 2
  REGION 1..10: note = Table B: HLA-DQA1*03:01-B1*03:02L
YRAFDIYNDK

SEQ ID NO: 24971 - protein, 10 aa, Severe acute respiratory syndrome coronavirus 2
  REGION 1..10: note = Table B: HLA-DQA1*03:01-B1*03:02L
YNDKVAGFAK

SEQ ID NO: 24972 - protein, 10 aa, Severe acute respiratory syndrome coronavirus 2
  REGION 1..10: note = Table B: HLA-DQA1*03:01-B1*03:02L
RFQEKDEDDN

SEQ ID NO: 24973 - protein, 10 aa, Severe acute respiratory syndrome coronavirus 2
  REGION 1..10: note = Table B: HLA-DQA1*03:01-B1*03:02L HLA-DPA1*01:02-B1*04:01L
LIDSYFVVKR

SEQ ID NO: 24974 - protein, 10 aa, Severe acute respiratory syndrome coronavirus 2
  REGION 1..10: note = Table B: HLA-DQA1*03:01-B1*03:02L HLA-DPA1*01:02-B1*04:01L HLA-DQA1*01:03-B1*06:01L HLA-DQA1*02:01-B1*03:03L
DSYFVVKRHT

SEQ ID NO: 24975 - protein, 10 aa, Severe acute respiratory syndrome coronavirus 2
  REGION 1..10: note = Table B: HLA-DQA1*03:01-B1*03:02L HLA-DQA1*01:03-B1*06:01L HLA-DQA1*02:01-B1*03:03L
HTFSNYQHEE

SEQ ID NO: 24976 - protein, 10 aa, Severe acute respiratory syndrome coronavirus 2
  REGION 1..10: note = Table B: HLA-DQA1*03:01-B1*03:02L HLA-DQA1*02:01-B1*03:03L
DGDMVPHISR

SEQ ID NO: 24977 - protein, 10 aa, Severe acute respiratory syndrome coronavirus 2
  REGION 1..10: note = Table B: HLA-DQA1*03:01-B1*03:02L HLA-DQA1*02:01-B1*03:03L
MVPHISRQRL

SEQ ID NO: 24978 - protein, 10 aa, Severe acute respiratory syndrome coronavirus 2
  REGION 1..10: note = Table B: HLA-DQA1*03:01-B1*03:02L HLA-DQA1*02:01-B1*03:03L
RALTAESHVD

SEQ ID NO: 24979 - protein, 10 aa, Severe acute respiratory syndrome coronavirus 2
  REGION 1..10: note = Table B: HLA-DQA1*03:01-B1*03:02L
DTDLTKPYIK

SEQ ID NO: 24980 - protein, 11 aa, Severe acute respiratory syndrome coronavirus 2
  REGION 1..11: note = Table B: HLA-DQA1*03:01-B1*03:02L
DLLKYDFTEER

SEQ ID NO: 24981 - protein, 11 aa, Severe acute respiratory syndrome coronavirus 2
  REGION 1..11: note = Table B: HLA-DQA1*03:01-B1*03:02L
FTEERLKLFDR

SEQ ID NO: 24982 - protein, 10 aa, Severe acute respiratory syndrome coronavirus 2
  REGION 1..10: note = Table B: HLA-DQA1*03:01-B1*03:02L
PPTSFGPLVR

SEQ ID NO: 24983 - protein, 11 aa, Severe acute respiratory syndrome coronavirus 2
  REGION 1..11: note = Table B: HLA-DQA1*03:01-B1*03:02L
GPLVRKIFVDG

SEQ ID NO: 24984 - protein, 10 aa, Severe acute respiratory syndrome coronavirus 2
  REGION 1..10: note = Table B: HLA-DQA1*03:01-B1*03:02L
QDVNLHSSRL

SEQ ID NO: 24985 - protein, 10 aa, Severe acute respiratory syndrome coronavirus 2
  REGION 1..10: note = Table B: HLA-DQA1*03:01-B1*03:02L
DVNLHSSRLS

SEQ ID NO: 24986 - protein, 11 aa, Severe acute respiratory syndrome coronavirus 2
  REGION 1..11: note = Table B: HLA-DQA1*03:01-B1*03:02L
ADPAMHAASGN

SEQ ID NO: 24987 - protein, 10 aa, Severe acute respiratory syndrome coronavirus 2
  REGION 1..10: note = Table B: HLA-DQA1*03:01-B1*03:02L HLA-DQA1*01:03-B1*06:01L HLA-DQA1*02:01-B1*03:03L
ASGNLLLDKR

SEQ ID NO: 24988 - protein, 11 aa, Severe acute respiratory syndrome coronavirus 2
  REGION 1..11: note = Table B: HLA-DQA1*03:01-B1*03:02L HLA-DQA1*01:03-B1*06:01L HLA-DQA1*02:01-B1*03:03L
SGNLLLDKRTT

SEQ ID NO: 24989 - protein, 10 aa, Severe acute respiratory syndrome coronavirus 2
  REGION 1..10: note = Table B: HLA-DQA1*03:01-B1*03:02L HLA-DRB1*16:01L HLA-DQA1*02:01-B1*03:03L
TVKPGNFNKD

SEQ ID NO: 24990 - protein, 12 aa, Severe acute respiratory syndrome coronavirus 2
  REGION 1..12: note = Table B: HLA-DQA1*03:01-B1*03:02L
VKPGNFNKDFYD

SEQ ID NO: 24991 - protein, 10 aa, Severe acute respiratory syndrome coronavirus 2
  REGION 1..10: note = Table B: HLA-DQA1*03:01-B1*03:02L HLA-DQA1*02:01-B1*03:03L
DFAVSKGFFK

SEQ ID NO: 24992 - protein, 10 aa, Severe acute respiratory syndrome coronavirus 2
  REGION 1..10: note = Table B: HLA-DQA1*03:01-B1*03:02L HLA-DQA1*02:01-B1*03:03L
AVSKGFFKEG

SEQ ID NO: 24993 - protein, 10 aa, Severe acute respiratory syndrome coronavirus 2
  REGION 1..10: note = Table B: HLA-DQA1*03:01-B1*03:02L HLA-DQA1*02:01-B1*03:03L
FKEGSSVELK

SEQ ID NO: 24994 - protein, 10 aa, Severe acute respiratory syndrome coronavirus 2
  REGION 1..10: note = Table B: HLA-DQA1*03:01-B1*03:02L
ANQVIVNNLD

SEQ ID NO: 24995 - protein, 10 aa, Severe acute respiratory syndrome coronavirus 2
  REGION 1..10: note = Table B: HLA-DQA1*03:01-B1*03:02L HLA-DQA1*02:01-B1*03:03L
DKSAGFPFNK

SEQ ID NO: 24996 - protein, 12 aa, Severe acute respiratory syndrome coronavirus 2
  REGION 1..12: note = Table B: HLA-DQA1*03:01-B1*03:02L
YYDSMSYEDQDA

SEQ ID NO: 24997 - protein, 10 aa, Severe acute respiratory syndrome coronavirus 2
  REGION 1..10: note = Table B: HLA-DQA1*03:01-B1*03:02L
DQDALFAYTK

SEQ ID NO: 24998 - protein, 11 aa, Severe acute respiratory syndrome coronavirus 2
  REGION 1..11: note = Table B: HLA-DQA1*03:01-B1*03:02L HLA-DQA1*02:01-B1*03:03L
TKRNVIPTITQ

SEQ ID NO: 24999 - protein, 10 aa, Severe acute respiratory syndrome coronavirus 2
  REGION 1..10: note = Table B: HLA-DQA1*03:01-B1*03:02L HLA-DQA1*01:03-B1*06:01L
NVIPTITQMN

SEQ ID NO: 25000 - protein, 10 aa, Severe acute respiratory syndrome coronavirus 2
  REGION 1..10: note = Table B: HLA-DQA1*03:01-B1*03:02L
IPTITQMNLK

SEQ ID NO: 25001 - protein, 10 aa, Severe acute respiratory syndrome coronavirus 2
  REGION 1..10: note = Table B: HLA-DQA1*03:01-B1*03:02L
KLLKSIAATR

SEQ ID NO: 25002 - protein, 11 aa, Severe acute respiratory syndrome coronavirus 2
  REGION 1..11: note = Table B: HLA-DQA1*03:01-B1*03:02L HLA-DRB1*16:01L
VVIGTSKFYGG

SEQ ID NO: 25003 - protein, 11 aa, Severe acute respiratory syndrome coronavirus 2
  REGION 1..11: note = Table B: HLA-DQA1*03:01-B1*03:02L
KFYGGWHNMLK

SEQ ID NO: 25004 - protein, 10 aa, Severe acute respiratory syndrome coronavirus 2
  REGION 1..10: note = Table B: HLA-DQA1*03:01-B1*03:02L HLA-DQA1*01:03-B1*06:01L HLA-DQA1*02:01-B1*03:03L
IMASLVLARK

SEQ ID NO: 25005 - protein, 11 aa, Severe acute respiratory syndrome coronavirus 2
  REGION 1..11: note = Table B: HLA-DQA1*03:01-B1*03:02L
GGSLYVKPGGT

SEQ ID NO: 25006 - protein, 12 aa, Severe acute respiratory syndrome coronavirus 2
  REGION 1..12: note = Table B: HLA-DQA1*03:01-B1*03:02L
YVKPGGTSSGDA

SEQ ID NO: 25007 - protein, 14 aa, Severe acute respiratory syndrome coronavirus 2
  REGION 1..14: note = Table B: HLA-DQA1*03:01-B1*03:02L HLA-DQA1*05:05-B1*03:01L
KPGGTSSGDATTAY

SEQ ID NO: 25008 - protein, 12 aa, Severe acute respiratory syndrome coronavirus 2
  REGION 1..12: note = Table B: HLA-DQA1*03:01-B1*03:02L
SGDATTAYANSV

SEQ ID NO: 25009 - protein, 11 aa, Severe acute respiratory syndrome coronavirus 2
  REGION 1..11: note = Table B: HLA-DQA1*03:01-B1*03:02L
DGNKIADKYVR

SEQ ID NO: 25010 - protein, 10 aa, Severe acute respiratory syndrome coronavirus 2
  REGION 1..10: note = Table B: HLA-DQA1*03:01-B1*03:02L HLA-DRB1*16:01L HLA-DQA1*02:01-B1*03:03L
KIADKYVRNL

SEQ ID NO: 25011 - protein, 11 aa, Severe acute respiratory syndrome coronavirus 2
  REGION 1..11: note = Table B: HLA-DQA1*03:01-B1*03:02L
RNRDVDTDFVN

SEQ ID NO: 25012 - protein, 11 aa, Severe acute respiratory syndrome coronavirus 2
  REGION 1..11: note = Table B: HLA-DQA1*03:01-B1*03:02L
NRDVDTDFVNE

SEQ ID NO: 25013 - protein, 12 aa, Severe acute respiratory syndrome coronavirus 2
  REGION 1..12: note = Table B: HLA-DQA1*03:01-B1*03:02L
DVDTDFVNEFYA

SEQ ID NO: 25014 - protein, 10 aa, Severe acute respiratory syndrome coronavirus 2
  REGION 1..10: note = Table B: HLA-DQA1*03:01-B1*03:02L HLA-DQA1*02:01-B1*03:03L
GLVASIKNFK

SEQ ID NO: 25015 - protein, 10 aa, Severe acute respiratory syndrome coronavirus 2
  REGION 1..10: note = Table B: HLA-DQA1*03:01-B1*03:02L
ETDLTKGPHE

SEQ ID NO: 25016 - protein, 11 aa, Severe acute respiratory syndrome coronavirus 2
  REGION 1..11: note = Table B: HLA-DQA1*03:01-B1*03:02L
GPHEFCSQHTM

SEQ ID NO: 25017 - protein, 11 aa, Severe acute respiratory syndrome coronavirus 2
  REGION 1..11: note = Table B: HLA-DQA1*03:01-B1*03:02L HLA-DQA1*02:01-B1*03:03L
DGTLMIERFVS

SEQ ID NO: 25018 - protein, 11 aa, Severe acute respiratory syndrome coronavirus 2
  REGION 1..11: note = Table B: HLA-DQA1*03:01-B1*03:02L
AIDAYPLTKHP

SEQ ID NO: 25019 - protein, 10 aa, Severe acute respiratory syndrome coronavirus 2
  REGION 1..10: note = Table B: HLA-DQA1*03:01-B1*03:02L
AYPLTKHPNQ

SEQ ID NO: 25020 - protein, 10 aa, Severe acute respiratory syndrome coronavirus 2
  REGION 1..10: note = Table B: HLA-DQA1*03:01-B1*03:02L
DNTSRYWEPE

SEQ ID NO: 25021 - protein, 10 aa, Severe acute respiratory syndrome coronavirus 2
  REGION 1..10: note = Table B: HLA-DQA1*03:01-B1*03:02L
TPHTVLQAVG

SEQ ID NO: 25022 - protein, 10 aa, Severe acute respiratory syndrome coronavirus 2
  REGION 1..10: note = Table B: HLA-DQA1*03:01-B1*03:02L HLA-DQA1*02:01-B1*03:03L
YDHVISTSHK

SEQ ID NO: 25023 - protein, 10 aa, Severe acute respiratory syndrome coronavirus 2
  REGION 1..10: note = Table B: HLA-DQA1*03:01-B1*03:02L HLA-DQA1*01:03-B1*06:01L HLA-DQA1*02:01-B1*03:03L
ANGQVFGLYK

SEQ ID NO: 25024 - protein, 13 aa, Severe acute respiratory syndrome coronavirus 2
  REGION 1..13: note = Table B: HLA-DQA1*03:01-B1*03:02L HLA-DQA1*01:03-B1*06:01L
VGSDNVTDFNAIA

SEQ ID NO: 25025 - protein, 11 aa, Severe acute respiratory syndrome coronavirus 2
  REGION 1..11: note = Table B: HLA-DQA1*03:01-B1*03:02L
ATEETFKLSYG

SEQ ID NO: 25026 - protein, 10 aa, Severe acute respiratory syndrome coronavirus 2
  REGION 1..10: note = Table B: HLA-DQA1*03:01-B1*03:02L
ATVREVLSDR

SEQ ID NO: 25027 - protein, 10 aa, Severe acute respiratory syndrome coronavirus 2
  REGION 1..10: note = Table B: HLA-DQA1*03:01-B1*03:02L HLA-DQA1*02:01-B1*03:03L
TVREVLSDRE

SEQ ID NO: 25028 - protein, 11 aa, Severe acute respiratory syndrome coronavirus 2
  REGION 1..11: note = Table B: HLA-DQA1*03:01-B1*03:02L HLA-DRB1*16:01L HLA-DQA1*02:01-B1*03:03L
VREVLSDRELH

SEQ ID NO: 25029 - protein, 10 aa, Severe acute respiratory syndrome coronavirus 2
  REGION 1..10: note = Table B: HLA-DQA1*03:01-B1*03:02L
TGYRVTKNSK

SEQ ID NO: 25030 - protein, 10 aa, Severe acute respiratory syndrome coronavirus 2
  REGION 1..10: note = Table B: HLA-DQA1*03:01-B1*03:02L HLA-DQA1*01:03-B1*06:01L HLA-DQA1*02:01-B1*03:03L
NSKVQIGEYT

SEQ ID NO: 25031 - protein, 11 aa, Severe acute respiratory syndrome coronavirus 2
  REGION 1..11: note = Table B: HLA-DQA1*03:01-B1*03:02L
VQIGEYTFEKG

SEQ ID NO: 25032 - protein, 11 aa, Severe acute respiratory syndrome coronavirus 2
  REGION 1..11: note = Table B: HLA-DQA1*03:01-B1*03:02L HLA-DQA1*01:03-B1*06:01L HLA-DQA1*02:01-B1*03:03L
DYGDAVVYRGT

SEQ ID NO: 25033 - protein, 10 aa, Severe acute respiratory syndrome coronavirus 2
  REGION 1..10: note = Table B: HLA-DQA1*03:01-B1*03:02L
GTTTYKLNVG

SEQ ID NO: 25034 - protein, 10 aa, Severe acute respiratory syndrome coronavirus 2
  REGION 1..10: note = Table B: HLA-DQA1*03:01-B1*03:02L HLA-DQA1*01:03-B1*06:01L HLA-DQA1*02:01-B1*03:03L
HTVMPLSAPT

SEQ ID NO: 25035 - protein, 12 aa, Severe acute respiratory syndrome coronavirus 2
  REGION 1..12: note = Table B: HLA-DQA1*03:01-B1*03:02L
MPLSAPTLVPQE

SEQ ID NO: 25036 - protein, 10 aa, Severe acute respiratory syndrome coronavirus 2
  REGION 1..10: note = Table B: HLA-DQA1*03:01-B1*03:02L
TLVPQEHYVR

SEQ ID NO: 25037 - protein, 10 aa, Severe acute respiratory syndrome coronavirus 2
  REGION 1..10: note = Table B: HLA-DQA1*03:01-B1*03:02L HLA-DQA1*02:01-B1*03:03L
GLALYYPSAR

SEQ ID NO: 25038 - protein, 10 aa, Severe acute respiratory syndrome coronavirus 2
  REGION 1..10: note = Table B: HLA-DQA1*03:01-B1*03:02L
HAAVDALCEK

SEQ ID NO: 25039 - protein, 10 aa, Severe acute respiratory syndrome coronavirus 2
  REGION 1..10: note = Table B: HLA-DQA1*03:01-B1*03:02L
VNALPETTAD

SEQ ID NO: 25040 - protein, 10 aa, Severe acute respiratory syndrome coronavirus 2
  REGION 1..10: note = Table B: HLA-DQA1*03:01-B1*03:02L
LPAPRTLLTK

SEQ ID NO: 25041 - protein, 10 aa, Severe acute respiratory syndrome coronavirus 2
  REGION 1..10: note = Table B: HLA-DQA1*03:01-B1*03:02L HLA-DPA1*01:02-B1*04:01L HLA-DQA1*01:03-B1*06:01L HLA-DQA1*02:01-B1*03:03L
YKGVITHDVS

SEQ ID NO: 25042 - protein, 10 aa, Severe acute respiratory syndrome coronavirus 2
  REGION 1..10: note = Table B: HLA-DQA1*03:01-B1*03:02L
THDVSSAINR

SEQ ID NO: 25043 - protein, 10 aa, Severe acute respiratory syndrome coronavirus 2
  REGION 1..10: note = Table B: HLA-DQA1*03:01-B1*03:02L
HDVSSAINRP

SEQ ID NO: 25044 - protein, 11 aa, Severe acute respiratory syndrome coronavirus 2
  REGION 1..11: note = Table B: HLA-DQA1*03:01-B1*03:02L
RPQIGVVREFL

SEQ ID NO: 25045 - protein, 12 aa, Severe acute respiratory syndrome coronavirus 2
  REGION 1..12: note = Table B: HLA-DQA1*03:01-B1*03:02L
RKAVFISPYNSQ

SEQ ID NO: 25046 - protein, 10 aa, Severe acute respiratory syndrome coronavirus 2
  REGION 1..10: note = Table B: HLA-DQA1*03:01-B1*03:02L HLA-DQA1*02:01-B1*03:03L
QNAVASKILG

SEQ ID NO: 25047 - protein, 11 aa, Severe acute respiratory syndrome coronavirus 2
  REGION 1..11: note = Table B: HLA-DQA1*03:01-B1*03:02L
TVDSSQGSEYD

SEQ ID NO: 25048 - protein, 15 aa, Severe acute respiratory syndrome coronavirus 2
  REGION 1..15: note = Table B: HLA-DQA1*03:01-B1*03:02L
VDSSQGSEYDYVIFT

SEQ ID NO: 25049 - protein, 10 aa, Severe acute respiratory syndrome coronavirus 2
  REGION 1..10: note = Table B: HLA-DQA1*03:01-B1*03:02L HLA-DPA1*01:02-B1*04:01L HLA-DQA1*02:01-B1*03:03L
VNRFNVAITR

SEQ ID NO: 25050 - protein, 10 aa, Severe acute respiratory syndrome coronavirus 2
  REGION 1..10: note = Table B: HLA-DQA1*03:01-B1*03:02L HLA-DQA1*01:03-B1*06:01L HLA-DQA1*02:01-B1*03:03L
QFTSLEIPRR

SEQ ID NO: 25051 - protein, 10 aa, Severe acute respiratory syndrome coronavirus 2
  REGION 1..10: note = Table B: HLA-DQA1*03:01-B1*03:02L
QAENVTGLFK

SEQ ID NO: 25052 - protein, 10 aa, Severe acute respiratory syndrome coronavirus 2
  REGION 1..10: note = Table B: HLA-DQA1*03:01-B1*03:02L
KVITGLHPTQ

SEQ ID NO: 25053 - protein, 10 aa, Severe acute respiratory syndrome coronavirus 2
  REGION 1..10: note = Table B: HLA-DQA1*03:01-B1*03:02L
APTHLSVDTK

SEQ ID NO: 25054 - protein, 11 aa, Severe acute respiratory syndrome coronavirus 2
  REGION 1..11: note = Table B: HLA-DQA1*03:01-B1*03:02L
IPGIPKDMTYR

SEQ ID NO: 25055 - protein, 10 aa, Severe acute respiratory syndrome coronavirus 2
  REGION 1..10: note = Table B: HLA-DQA1*03:01-B1*03:02L HLA-DQA1*02:01-B1*03:03L
YPNMFITREE

SEQ ID NO: 25056 - protein, 10 aa, Severe acute respiratory syndrome coronavirus 2
  REGION 1..10: note = Table B: HLA-DQA1*03:01-B1*03:02L HLA-DPA1*01:02-B1*04:01L HLA-DRB1*16:01L HLA-DQA1*02:01-B1*03:03L
MFITREEAIR

SEQ ID NO: 25057 - protein, 10 aa, Severe acute respiratory syndrome coronavirus 2
  REGION 1..10: note = Table B: HLA-DQA1*03:01-B1*03:02L
TREEAIRHVR

SEQ ID NO: 25058 - protein, 10 aa, Severe acute respiratory syndrome coronavirus 2
  REGION 1..10: note = Table B: HLA-DQA1*03:01-B1*03:02L HLA-DQA1*01:03-B1*06:01L HLA-DQA1*02:01-B1*03:03L
VGTNLPLQLG

SEQ ID NO: 25059 - protein, 12 aa, Severe acute respiratory syndrome coronavirus 2
  REGION 1..12: note = Table B: HLA-DQA1*03:01-B1*03:02L HLA-DQA1*01:03-B1*06:01L HLA-DQA1*02:01-B1*03:03L
STGVNLVAVPTG

SEQ ID NO: 25060 - protein, 11 aa, Severe acute respiratory syndrome coronavirus 2
  REGION 1..11: note = Table B: HLA-DQA1*03:01-B1*03:02L HLA-DQA1*01:03-B1*06:01L HLA-DQA1*02:01-B1*03:03L
TPNNTDFSRVS

SEQ ID NO: 25061 - protein, 11 aa, Severe acute respiratory syndrome coronavirus 2
  REGION 1..11: note = Table B: HLA-DQA1*03:01-B1*03:02L
SAKPPPGDQFK

SEQ ID NO: 25062 - protein, 10 aa, Severe acute respiratory syndrome coronavirus 2
  REGION 1..10: note = Table B: HLA-DQA1*03:01-B1*03:02L HLA-DQA1*02:01-B1*03:03L
SDTLKNLSDR

SEQ ID NO: 25063 - protein, 10 aa, Severe acute respiratory syndrome coronavirus 2
  REGION 1..10: note = Table B: HLA-DQA1*03:01-B1*03:02L HLA-DQA1*01:03-B1*06:01L HLA-DQA1*02:01-B1*03:03L
GFTGNLQSNH

SEQ ID NO: 25064 - protein, 10 aa, Severe acute respiratory syndrome coronavirus 2
  REGION 1..10: note = Table B: HLA-DQA1*03:01-B1*03:02L
TIEYPIIGDE

SEQ ID NO: 25065 - protein, 12 aa, Severe acute respiratory syndrome coronavirus 2
  REGION 1..12: note = Table B: HLA-DQA1*03:01-B1*03:02L HLA-DQA1*01:03-B1*06:01L HLA-DQA1*02:01-B1*03:03L
YDAQPCSDKAYK

SEQ ID NO: 25066 - protein, 10 aa, Severe acute respiratory syndrome coronavirus 2
  REGION 1..10: note = Table B: HLA-DQA1*03:01-B1*03:02L
ATHSDKFTDG

SEQ ID NO: 25067 - protein, 10 aa, Severe acute respiratory syndrome coronavirus 2
  REGION 1..10: note = Table B: HLA-DQA1*03:01-B1*03:02L
RYPANSIVCR

SEQ ID NO: 25068 - protein, 10 aa, Severe acute respiratory syndrome coronavirus 2
  REGION 1..10: note = Table B: HLA-DQA1*03:01-B1*03:02L HLA-DQA1*01:03-B1*06:01L
FDTRVLSNLN

SEQ ID NO: 25069 - protein, 10 aa, Severe acute respiratory syndrome coronavirus 2
  REGION 1..10: note = Table B: HLA-DQA1*03:01-B1*03:02L HLA-DQA1*01:03-B1*06:01L HLA-DQA1*02:01-B1*03:03L
DGGSLYVNKH

SEQ ID NO: 25070 - protein, 10 aa, Severe acute respiratory syndrome coronavirus 2
  REGION 1..10: note = Table B: HLA-DQA1*03:01-B1*03:02L HLA-DQA1*02:01-B1*03:03L
AFHTPAFDKS

SEQ ID NO: 25071 - protein, 12 aa, Severe acute respiratory syndrome coronavirus 2
  REGION 1..12: note = Table B: HLA-DQA1*03:01-B1*03:02L
YSDSPCESHGKQ

SEQ ID NO: 25072 - protein, 11 aa, Severe acute respiratory syndrome coronavirus 2
  REGION 1..11: note = Table B: HLA-DQA1*03:01-B1*03:02L
SHGKQVVSDID

SEQ ID NO: 25073 - protein, 13 aa, Severe acute respiratory syndrome coronavirus 2
  REGION 1..13: note = Table B: HLA-DQA1*03:01-B1*03:02L HLA-DRB1*16:01L HLA-DQA1*02:01-B1*03:03L HLA-DRB1*15:03L
AGFSLWVYKQFDT

SEQ ID NO: 25074 - protein, 11 aa, Severe acute respiratory syndrome coronavirus 2
  REGION 1..11: note = Table B: HLA-DQA1*03:01-B1*03:02L
FDGQQGEVPVS

SEQ ID NO: 25075 - protein, 10 aa, Severe acute respiratory syndrome coronavirus 2
  REGION 1..10: note = Table B: HLA-DQA1*03:01-B1*03:02L
NNTVYTKVDG

SEQ ID NO: 25076 - protein, 10 aa, Severe acute respiratory syndrome coronavirus 2
  REGION 1..10: note = Table B: HLA-DQA1*03:01-B1*03:02L
GVDVELFENK

SEQ ID NO: 25077 - protein, 10 aa, Severe acute respiratory syndrome coronavirus 2
  REGION 1..10: note = Table B: HLA-DQA1*03:01-B1*03:02L HLA-DQA1*01:03-B1*06:01L HLA-DQA1*02:01-B1*03:03L
NKTTLPVNVA

SEQ ID NO: 25078 - protein, 10 aa, Severe acute respiratory syndrome coronavirus 2
  REGION 1..10: note = Table B: HLA-DQA1*03:01-B1*03:02L
AKRNIKPVPE

SEQ ID NO: 25079 - protein, 10 aa, Severe acute respiratory syndrome coronavirus 2
  REGION 1..10: note = Table B: HLA-DQA1*03:01-B1*03:02L
RVDGQVDLFR

SEQ ID NO: 25080 - protein, 10 aa, Severe acute respiratory syndrome coronavirus 2
  REGION 1..10: note = Table B: HLA-DQA1*03:01-B1*03:02L
GQVDLFRNAR

SEQ ID NO: 25081 - protein, 10 aa, Severe acute respiratory syndrome coronavirus 2
  REGION 1..10: note = Table B: HLA-DQA1*03:01-B1*03:02L
PSVGPKQASL

SEQ ID NO: 25082 - protein, 10 aa, Severe acute respiratory syndrome coronavirus 2
  REGION 1..10: note = Table B: HLA-DQA1*03:01-B1*03:02L
AVKTQFNYYK

SEQ ID NO: 25083 - protein, 10 aa, Severe acute respiratory syndrome coronavirus 2
  REGION 1..10: note = Table B: HLA-DQA1*03:01-B1*03:02L
KKVDGVVQQL

SEQ ID NO: 25084 - protein, 11 aa, Severe acute respiratory syndrome coronavirus 2
  REGION 1..11: note = Table B: HLA-DQA1*03:01-B1*03:02L
QLPETYFTQSR

SEQ ID NO: 25085 - protein, 11 aa, Severe acute respiratory syndrome coronavirus 2
  REGION 1..11: note = Table B: HLA-DQA1*03:01-B1*03:02L HLA-DQA1*02:01-B1*03:03L
PETYFTQSRNL

SEQ ID NO: 25086 - protein, 10 aa, Severe acute respiratory syndrome coronavirus 2
  REGION 1..10: note = Table B: HLA-DQA1*03:01-B1*03:02L HLA-DPA1*01:02-B1*04:01L HLA-DQA1*02:01-B1*03:03L
TYFTQSRNLQ

SEQ ID NO: 25087 - protein, 10 aa, Severe acute respiratory syndrome coronavirus 2
  REGION 1..10: note = Table B: HLA-DQA1*03:01-B1*03:02L
SRNLQEFKPR

SEQ ID NO: 25088 - protein, 12 aa, Severe acute respiratory syndrome coronavirus 2
  REGION 1..12: note = Table B: HLA-DQA1*03:01-B1*03:02L
KPRSQMEIDFLE

SEQ ID NO: 25089 - protein, 10 aa, Severe acute respiratory syndrome coronavirus 2
  REGION 1..10: note = Table B: HLA-DQA1*03:01-B1*03:02L HLA-DPA1*01:02-B1*04:01L
YKLEGYAFEH

SEQ ID NO: 25090 - protein, 10 aa, Severe acute respiratory syndrome coronavirus 2
  REGION 1..10: note = Table B: HLA-DQA1*03:01-B1*03:02L
EHIVYGDFSH

SEQ ID NO: 25091 - protein, 11 aa, Severe acute respiratory syndrome coronavirus 2
  REGION 1..11: note = Table B: HLA-DQA1*03:01-B1*03:02L
GLHLLIGLAKR

SEQ ID NO: 25092 - protein, 10 aa, Severe acute respiratory syndrome coronavirus 2
  REGION 1..10: note = Table B: HLA-DQA1*03:01-B1*03:02L HLA-DQA1*02:01-B1*03:03L
DFIPMDSTVK

SEQ ID NO: 25093 - protein, 11 aa, Severe acute respiratory syndrome coronavirus 2
  REGION 1..11: note = Table B: HLA-DQA1*03:01-B1*03:02L HLA-DQA1*01:03-B1*06:01L
DSTVKNYFITD

SEQ ID NO: 25094 - protein, 10 aa, Severe acute respiratory syndrome coronavirus 2
  REGION 1..10: note = Table B: HLA-DQA1*03:01-B1*03:02L HLA-DQA1*01:03-B1*06:01L HLA-DQA1*02:01-B1*03:03L
SVVSKVVKVT

SEQ ID NO: 25095 - protein, 10 aa, Severe acute respiratory syndrome coronavirus 2
  REGION 1..10: note = Table B: HLA-DQA1*03:01-B1*03:02L HLA-DQA1*02:01-B1*03:03L
DGHVETFYPK

SEQ ID NO: 25096 - protein, 10 aa, Severe acute respiratory syndrome coronavirus 2
  REGION 1..10: note = Table B: HLA-DQA1*03:01-B1*03:02L
AMPNLYKMQR

SEQ ID NO: 25097 - protein, 11 aa, Severe acute respiratory syndrome coronavirus 2
  REGION 1..11: note = Table B: HLA-DQA1*03:01-B1*03:02L
LNTLTLAVPYN

SEQ ID NO: 25098 - protein, 10 aa, Severe acute respiratory syndrome coronavirus 2
  REGION 1..10: note = Table B: HLA-DQA1*03:01-B1*03:02L
AVPYNMRVIH

SEQ ID NO: 25099 - protein, 11 aa, Severe acute respiratory syndrome coronavirus 2
  REGION 1..11: note = Table B: HLA-DQA1*03:01-B1*03:02L
VPYNMRVIHFG

SEQ ID NO: 25100 - protein, 11 aa, Severe acute respiratory syndrome coronavirus 2
  REGION 1..11: note = Table B: HLA-DQA1*03:01-B1*03:02L
GAGSDKGVAPG

SEQ ID NO: 25101 - protein, 11 aa, Severe acute respiratory syndrome coronavirus 2
  REGION 1..11: note = Table B: HLA-DQA1*03:01-B1*03:02L HLA-DQA1*02:01-B1*03:03L
TAVLRQWLPTG

SEQ ID NO: 25102 - protein, 11 aa, Severe acute respiratory syndrome coronavirus 2
  REGION 1..11: note = Table B: HLA-DQA1*03:01-B1*03:02L
DPKTKNVTKEN

SEQ ID NO: 25103 - protein, 12 aa, Severe acute respiratory syndrome coronavirus 2
  REGION 1..12: note = Table B: HLA-DQA1*03:01-B1*03:02L
TKNVTKENDSKE

SEQ ID NO: 25104 - protein, 10 aa, Severe acute respiratory syndrome coronavirus 2
  REGION 1..10: note = Table B: HLA-DQA1*03:01-B1*03:02L HLA-DQA1*01:03-B1*06:01L HLA-DQA1*02:01-B1*03:03L
GSVAIKITEH

SEQ ID NO: 25105 - protein, 10 aa, Severe acute respiratory syndrome coronavirus 2
  REGION 1..10: note = Table B: HLA-DQA1*03:01-B1*03:02L HLA-DQA1*01:03-B1*06:01L HLA-DQA1*02:01-B1*03:03L
LGKPREQIDG

SEQ ID NO: 25106 - protein, 10 aa, Severe acute respiratory syndrome coronavirus 2
  REGION 1..10: note = Table B: HLA-DQA1*03:01-B1*03:02L HLA-DQA1*02:01-B1*03:03L
KLRGTAVMSL

SEQ ID NO: 25107 - protein, 10 aa, Severe acute respiratory syndrome coronavirus 2
  REGION 1..10: note = Table B: HLA-DQA1*03:01-B1*03:02L HLA-DQA1*01:03-B1*06:01L HLA-DQA1*02:01-B1*03:03L
GTAVMSLKEG

SEQ ID NO: 25108 - protein, 10 aa, Severe acute respiratory syndrome coronavirus 2
  REGION 1..10: note = Table B: HLA-DQA1*03:01-B1*03:02L
MSLKEGQIND

SEQ ID NO: 25109 - protein, 10 aa, Severe acute respiratory syndrome coronavirus 2
  REGION 1..10: note = Table B: HLA-DQA1*03:01-B1*03:02L
MILSLLSKGR

SEQ ID NO: 25110 - protein, 10 aa, Severe acute respiratory syndrome coronavirus 2
  REGION 1..10: note = Table B: HLA-DQA1*03:01-B1*03:02L
GRLIIRENNR

SEQ ID NO: 25111 - protein, 11 aa, Severe acute respiratory syndrome coronavirus 2
  REGION 1..11: note = Table B: HLA-DQA1*03:01-B1*03:02L
LPPAYTNSFTR

SEQ ID NO: 25112 - protein, 11 aa, Severe acute respiratory syndrome coronavirus 2
  REGION 1..11: note = Table B: HLA-DQA1*03:01-B1*03:02L
PPAYTNSFTRG

SEQ ID NO: 25113 - protein, 11 aa, Severe acute respiratory syndrome coronavirus 2
  REGION 1..11: note = Table B: HLA-DQA1*03:01-B1*03:02L
NSFTRGVYYPD

SEQ ID NO: 25114 - protein, 11 aa, Severe acute respiratory syndrome coronavirus 2
  REGION 1..11: note = Table B: HLA-DQA1*03:01-B1*03:02L
YPDKVFRSSVL

SEQ ID NO: 25115 - protein, 10 aa, Severe acute respiratory syndrome coronavirus 2
  REGION 1..10: note = Table B: HLA-DQA1*03:01-B1*03:02L HLA-DQA1*02:01-B1*03:03L
DGVYFASTEK

SEQ ID NO: 25116 - protein, 13 aa, Severe acute respiratory syndrome coronavirus 2
  REGION 1..13: note = Table B: HLA-DQA1*03:01-B1*03:02L
IIRGWIFGTTLDS

SEQ ID NO: 25117 - protein, 11 aa, Severe acute respiratory syndrome coronavirus 2
  REGION 1..11: note = Table B: HLA-DQA1*03:01-B1*03:02L HLA-DQA1*01:03-B1*06:01L HLA-DQA1*02:01-B1*03:03L
DSKTQSLLIVN

SEQ ID NO: 25118 - protein, 10 aa, Severe acute respiratory syndrome coronavirus 2
  REGION 1..10: note = Table B: HLA-DQA1*03:01-B1*03:02L HLA-DQA1*02:01-B1*03:03L
KTQSLLIVNN

SEQ ID NO: 25119 - protein, 11 aa, Severe acute respiratory syndrome coronavirus 2
  REGION 1..11: note = Table B: HLA-DQA1*03:01-B1*03:02L
QSLLIVNNATN

SEQ ID NO: 25120 - protein, 10 aa, Severe acute respiratory syndrome coronavirus 2
  REGION 1..10: note = Table B: HLA-DQA1*03:01-B1*03:02L
DPFLGVYYHK

SEQ ID NO: 25121 - protein, 11 aa, Severe acute respiratory syndrome coronavirus 2
  REGION 1..11: note = Table B: HLA-DQA1*03:01-B1*03:02L HLA-DQA1*01:03-B1*06:01L
NNKSWMESEFR

SEQ ID NO: 25122 - protein, 11 aa, Severe acute respiratory syndrome coronavirus 2
  REGION 1..11: note = Table B: HLA-DQA1*03:01-B1*03:02L
QPFLMDLEGKQ

SEQ ID NO: 25123 - protein, 10 aa, Severe acute respiratory syndrome coronavirus 2
  REGION 1..10: note = Table B: HLA-DQA1*03:01-B1*03:02L
DLEGKQGNFK

SEQ ID NO: 25124 - protein, 10 aa, Severe acute respiratory syndrome coronavirus 2
  REGION 1..10: note = Table B: HLA-DQA1*03:01-B1*03:02L
REFVFKNIDG

SEQ ID NO: 25125 - protein, 10 aa, Severe acute respiratory syndrome coronavirus 2
  REGION 1..10: note = Table B: HLA-DQA1*03:01-B1*03:02L
VFKNIDGYFK

SEQ ID NO: 25126 - protein, 12 aa, Severe acute respiratory syndrome coronavirus 2
  REGION 1..12: note = Table B: HLA-DQA1*03:01-B1*03:02L HLA-DQA1*02:01-B1*03:03L
LHRSYLTPGDSS

SEQ ID NO: 25127 - protein, 10 aa, Severe acute respiratory syndrome coronavirus 2
  REGION 1..10: note = Table B: HLA-DQA1*03:01-B1*03:02L
YLQPRTFLLK

SEQ ID NO: 25128 - protein, 10 aa, Severe acute respiratory syndrome coronavirus 2
  REGION 1..10: note = Table B: HLA-DQA1*03:01-B1*03:02L
SFVIRGDEVR

SEQ ID NO: 25129 - protein, 10 aa, Severe acute respiratory syndrome coronavirus 2
  REGION 1..10: note = Table B: HLA-DQA1*03:01-B1*03:02L HLA-DQA1*02:01-B1*03:03L
TGKIADYNYK

SEQ ID NO: 25130 - protein, 10 aa, Severe acute respiratory syndrome coronavirus 2
  REGION 1..10: note = Table B: HLA-DQA1*03:01-B1*03:02L HLA-DRB1*14:17L
AWNSNNLDSK

SEQ ID NO: 25131 - protein, 10 aa, Severe acute respiratory syndrome coronavirus 2
  REGION 1..10: note = Table B: HLA-DQA1*03:01-B1*03:02L
NSNNLDSKVG

SEQ ID NO: 25132 - protein, 11 aa, Severe acute respiratory syndrome coronavirus 2
  REGION 1..11: note = Table B: HLA-DQA1*03:01-B1*03:02L
DSKVGGNYNYL

SEQ ID NO: 25133 - protein, 10 aa, Severe acute respiratory syndrome coronavirus 2
  REGION 1..10: note = Table B: HLA-DQA1*03:01-B1*03:02L
VGGNYNYLYR

SEQ ID NO: 25134 - protein, 11 aa, Severe acute respiratory syndrome coronavirus 2
  REGION 1..11: note = Table B: HLA-DQA1*03:01-B1*03:02L HLA-DQA1*01:03-B1*06:01L
RDISTEIYQAG

SEQ ID NO: 25135 - protein, 12 aa, Severe acute respiratory syndrome coronavirus 2
  REGION 1..12: note = Table B: HLA-DQA1*03:01-B1*03:02L HLA-DQA1*01:03-B1*06:01L
ISTEIYQAGSTP

SEQ ID NO: 25136 - protein, 13 aa, Severe acute respiratory syndrome coronavirus 2
  REGION 1..13: note = Table B: HLA-DQA1*03:01-B1*03:02L
YQAGSTPCNGVEG

SEQ ID NO: 25137 - protein, 10 aa, Severe acute respiratory syndrome coronavirus 2
  REGION 1..10: note = Table B: HLA-DQA1*03:01-B1*03:02L
TNGVGYQPYR

SEQ ID NO: 25138 - protein, 11 aa, Severe acute respiratory syndrome coronavirus 2
  REGION 1..11: note = Table B: HLA-DQA1*03:01-B1*03:02L
GPKKSTNLVKN

SEQ ID NO: 25139 - protein, 12 aa, Severe acute respiratory syndrome coronavirus 2
  REGION 1..12: note = Table B: HLA-DQA1*03:01-B1*03:02L
VNFNFNGLTGTG

SEQ ID NO: 25140 - protein, 10 aa, Severe acute respiratory syndrome coronavirus 2
  REGION 1..10: note = Table B: HLA-DQA1*03:01-B1*03:02L HLA-DQA1*01:03-B1*06:01L HLA-DQA1*02:01-B1*03:03L
TGVLTESNKK

SEQ ID NO: 25141 - protein, 10 aa, Severe acute respiratory syndrome coronavirus 2
  REGION 1..10: note = Table B: HLA-DQA1*03:01-B1*03:02L
KFLPFQQFGR

SEQ ID NO: 25142 - protein, 14 aa, Severe acute respiratory syndrome coronavirus 2
  REGION 1..14: note = Table B: HLA-DQA1*03:01-B1*03:02L
EILDITPCSFGGVS

SEQ ID NO: 25143 - protein, 12 aa, Severe acute respiratory syndrome coronavirus 2
  REGION 1..12: note = Table B: HLA-DQA1*03:01-B1*03:02L
VSVITPGTNTSN

SEQ ID NO: 25144 - protein, 12 aa, Severe acute respiratory syndrome coronavirus 2
  REGION 1..12: note = Table B: HLA-DQA1*03:01-B1*03:02L HLA-DQA1*01:03-B1*06:01L
NTSNQVAVLYQD

SEQ ID NO: 25145 - protein, 10 aa, Severe acute respiratory syndrome coronavirus 2
  REGION 1..10: note = Table B: HLA-DQA1*03:01-B1*03:02L
HADQLTPTWR

SEQ ID NO: 25146 - protein, 10 aa, Severe acute respiratory syndrome coronavirus 2
  REGION 1..10: note = Table B: HLA-DQA1*03:01-B1*03:02L
TQTNSPRRAR

SEQ ID NO: 25147 - protein, 11 aa, Severe acute respiratory syndrome coronavirus 2
  REGION 1..11: note = Table B: HLA-DQA1*03:01-B1*03:02L
SVASQSIIAYT

SEQ ID NO: 25148 - protein, 12 aa, Severe acute respiratory syndrome coronavirus 2
  REGION 1..12: note = Table B: HLA-DQA1*03:01-B1*03:02L
GAENSVAYSNNS

SEQ ID NO: 25149 - protein, 10 aa, Severe acute respiratory syndrome coronavirus 2
  REGION 1..10: note = Table B: HLA-DQA1*03:01-B1*03:02L HLA-DQA1*01:03-B1*06:01L HLA-DQA1*02:01-B1*03:03L
NSIAIPTNFT

SEQ ID NO: 25150 - protein, 10 aa, Severe acute respiratory syndrome coronavirus 2
  REGION 1..10: note = Table B: HLA-DQA1*03:01-B1*03:02L HLA-DQA1*01:03-B1*06:01L HLA-DQA1*02:01-B1*03:03L
SVTTEILPVS

SEQ ID NO: 25151 - protein, 10 aa, Severe acute respiratory syndrome coronavirus 2
  REGION 1..10: note = Table B: HLA-DQA1*03:01-B1*03:02L HLA-DQA1*01:03-B1*06:01L HLA-DQA1*02:01-B1*03:03L
ALTGIAVEQD

SEQ ID NO: 25152 - protein, 10 aa, Severe acute respiratory syndrome coronavirus 2
  REGION 1..10: note = Table B: HLA-DQA1*03:01-B1*03:02L
GIAVEQDKNT

SEQ ID NO: 25153 - protein, 10 aa, Severe acute respiratory syndrome coronavirus 2
  REGION 1..10: note = Table B: HLA-DQA1*03:01-B1*03:02L
VFAQVKQIYK

SEQ ID NO: 25154 - protein, 10 aa, Severe acute respiratory syndrome coronavirus 2
  REGION 1..10: note = Table B: HLA-DQA1*03:01-B1*03:02L
FSQILPDPSK

SEQ ID NO: 25155 - protein, 11 aa, Severe acute respiratory syndrome coronavirus 2
  REGION 1..11: note = Table B: HLA-DQA1*03:01-B1*03:02L HLA-DQA1*01:03-B1*06:01L
LADAGFIKQYG

SEQ ID NO: 25156 - protein, 12 aa, Severe acute respiratory syndrome coronavirus 2
  REGION 1..12: note = Table B: HLA-DQA1*03:01-B1*03:02L
GDCLGDIAARDL

SEQ ID NO: 25157 - protein, 13 aa, Severe acute respiratory syndrome coronavirus 2
  REGION 1..13: note = Table B: HLA-DQA1*03:01-B1*03:02L
GDIAARDLICAQK

SEQ ID NO: 25158 - protein, 10 aa, Severe acute respiratory syndrome coronavirus 2
  REGION 1..10: note = Table B: HLA-DQA1*03:01-B1*03:02L
TVLPPLLTDE

SEQ ID NO: 25159 - protein, 10 aa, Severe acute respiratory syndrome coronavirus 2
  REGION 1..10: note = Table B: HLA-DQA1*03:01-B1*03:02L HLA-DQA1*01:03-B1*06:01L HLA-DQA1*02:01-B1*03:03L
AALQIPFAMQ

SEQ ID NO: 25160 - protein, 10 aa, Severe acute respiratory syndrome coronavirus 2
  REGION 1..10: note = Table B: HLA-DQA1*03:01-B1*03:02L
IPFAMQMAYR

SEQ ID NO: 25161 - protein, 10 aa, Severe acute respiratory syndrome coronavirus 2
  REGION 1..10: note = Table B: HLA-DQA1*03:01-B1*03:02L HLA-DQA1*02:01-B1*03:03L
TQNVLYENQK

SEQ ID NO: 25162 - protein, 10 aa, Severe acute respiratory syndrome coronavirus 2
  REGION 1..10: note = Table B: HLA-DQA1*03:01-B1*03:02L
ANQFNSAIGK

SEQ ID NO: 25163 - protein, 10 aa, Severe acute respiratory syndrome coronavirus 2
  REGION 1..10: note = Table B: HLA-DQA1*03:01-B1*03:02L
RLDKVEAEVQ

SEQ ID NO: 25164 - protein, 11 aa, Severe acute respiratory syndrome coronavirus 2
  REGION 1..11: note = Table B: HLA-DQA1*03:01-B1*03:02L
LDKVEAEVQID

SEQ ID NO: 25165 - protein, 10 aa, Severe acute respiratory syndrome coronavirus 2
  REGION 1..10: note = Table B: HLA-DQA1*03:01-B1*03:02L HLA-DQA1*02:01-B1*03:03L
KVEAEVQIDR

SEQ ID NO: 25166 - protein, 10 aa, Severe acute respiratory syndrome coronavirus 2
  REGION 1..10: note = Table B: HLA-DQA1*03:01-B1*03:02L HLA-DQA1*02:01-B1*03:03L
EVQIDRLITG

SEQ ID NO: 25167 - protein, 10 aa, Severe acute respiratory syndrome coronavirus 2
  REGION 1..10: note = Table B: HLA-DQA1*03:01-B1*03:02L HLA-DQA1*02:01-B1*03:03L
IDRLITGRLQ

SEQ ID NO: 25168 - protein, 11 aa, Severe acute respiratory syndrome coronavirus 2
  REGION 1..11: note = Table B: HLA-DQA1*03:01-B1*03:02L HLA-DQA1*01:03-B1*06:01L HLA-DQA1*02:01-B1*03:03L
TQQLIRAAEIR

SEQ ID NO: 25169 - protein, 10 aa, Severe acute respiratory syndrome coronavirus 2
  REGION 1..10: note = Table B: HLA-DQA1*03:01-B1*03:02L HLA-DQA1*02:01-B1*03:03L
DGKAHFPREG

SEQ ID NO: 25170 - protein, 10 aa, Severe acute respiratory syndrome coronavirus 2
  REGION 1..10: note = Table B: HLA-DQA1*03:01-B1*03:02L HLA-DQA1*02:01-B1*03:03L
EGVFVSNGTH

SEQ ID NO: 25171 - protein, 10 aa, Severe acute respiratory syndrome coronavirus 2
  REGION 1..10: note = Table B: HLA-DQA1*03:01-B1*03:02L
NGTHWFVTQR

SEQ ID NO: 25172 - protein, 10 aa, Severe acute respiratory syndrome coronavirus 2
  REGION 1..10: note = Table B: HLA-DQA1*03:01-B1*03:02L
YEPQIITTDN

SEQ ID NO: 25173 - protein, 11 aa, Severe acute respiratory syndrome coronavirus 2
  REGION 1..11: note = Table B: HLA-DQA1*03:01-B1*03:02L
DKYFKNHTSPD

SEQ ID NO: 25174 - protein, 12 aa, Severe acute respiratory syndrome coronavirus 2
  REGION 1..12: note = Table B: HLA-DQA1*03:01-B1*03:02L
HTSPDVDLGDIS

SEQ ID NO: 25175 - protein, 10 aa, Severe acute respiratory syndrome coronavirus 2
  REGION 1..10: note = Table B: HLA-DQA1*03:01-B1*03:02L
RLNEVAKNLN

SEQ ID NO: 25176 - protein, 11 aa, Severe acute respiratory syndrome coronavirus 2
  REGION 1..11: note = Table B: HLA-DQA1*03:01-B1*03:02L
VAKNLNESLID

SEQ ID NO: 25177 - protein, 10 aa, Severe acute respiratory syndrome coronavirus 2
  REGION 1..10: note = Table B: HLA-DQA1*03:01-B1*03:02L
IDLQELGKYE

SEQ ID NO: 25178 - protein, 10 aa, Severe acute respiratory syndrome coronavirus 2
  REGION 1..10: note = Table B: HLA-DQA1*03:01-B1*03:02L HLA-DQA1*02:01-B1*03:03L
DSEPVLKGVK

SEQ ID NO: 25179 - protein, 10 aa, Severe acute respiratory syndrome coronavirus 2
  REGION 1..10: note = Table B: HLA-DQA1*03:01-B1*03:02L
VTLKQGEIKD

SEQ ID NO: 25180 - protein, 10 aa, Severe acute respiratory syndrome coronavirus 2
  REGION 1..10: note = Table B: HLA-DQA1*03:01-B1*03:02L
KDATPSDFVR

SEQ ID NO: 25181 - protein, 10 aa, Severe acute respiratory syndrome coronavirus 2
  REGION 1..10: note = Table B: HLA-DQA1*03:01-B1*03:02L HLA-DQA1*01:03-B1*06:01L HLA-DQA1*02:01-B1*03:03L
ATPSDFVRAT

SEQ ID NO: 25182 - protein, 10 aa, Severe acute respiratory syndrome coronavirus 2
  REGION 1..10: note = Table B: HLA-DQA1*03:01-B1*03:02L
IPIQASLPFG

SEQ ID NO: 25183 - protein, 10 aa, Severe acute respiratory syndrome coronavirus 2
  REGION 1..10: note = Table B: HLA-DQA1*03:01-B1*03:02L
ASKIITLKKR

SEQ ID NO: 25184 - protein, 12 aa, Severe acute respiratory syndrome coronavirus 2
  REGION 1..12: note = Table B: HLA-DQA1*03:01-B1*03:02L
SKNPLLYDANYF

SEQ ID NO: 25185 - protein, 11 aa, Severe acute respiratory syndrome coronavirus 2
  REGION 1..11: note = Table B: HLA-DQA1*03:01-B1*03:02L
GYTEKWESGVK

SEQ ID NO: 25186 - protein, 11 aa, Severe acute respiratory syndrome coronavirus 2
  REGION 1..11: note = Table B: HLA-DQA1*03:01-B1*03:02L HLA-DQA1*01:03-B1*06:01L HLA-DQA1*02:01-B1*03:03L
LYSTQLSTDTG

SEQ ID NO: 25187 - protein, 10 aa, Severe acute respiratory syndrome coronavirus 2
  REGION 1..10: note = Table B: HLA-DQA1*03:01-B1*03:02L
EHVTFFIYNK

SEQ ID NO: 25188 - protein, 12 aa, Severe acute respiratory syndrome coronavirus 2
  REGION 1..12: note = Table B: HLA-DQA1*03:01-B1*03:02L
VDEPEEHVQIHT

SEQ ID NO: 25189 - protein, 10 aa, Severe acute respiratory syndrome coronavirus 2
  REGION 1..10: note = Table B: HLA-DQA1*03:01-B1*03:02L
EHVQIHTIDG

SEQ ID NO: 25190 - protein, 11 aa, Severe acute respiratory syndrome coronavirus 2
  REGION 1..11: note = Table B: HLA-DQA1*03:01-B1*03:02L
SSGVVNPVMEP

SEQ ID NO: 25191 - protein, 11 aa, Severe acute respiratory syndrome coronavirus 2
  REGION 1..11: note = Table B: HLA-DQA1*03:01-B1*03:02L
VVNPVMEPIYD

SEQ ID NO: 25192 - protein, 11 aa, Severe acute respiratory syndrome coronavirus 2
  REGION 1..11: note = Table B: HLA-DQA1*03:01-B1*03:02L HLA-DPA1*01:02-B1*04:01L
LVKPSFYVYSR

SEQ ID NO: 25193 - protein, 10 aa, Severe acute respiratory syndrome coronavirus 2
  REGION 1..10: note = Table B: HLA-DQA1*03:01-B1*03:02L
SRVKNLNSSR

SEQ ID NO: 25194 - protein, 10 aa, Severe acute respiratory syndrome coronavirus 2
  REGION 1..10: note = Table B: HLA-DQA1*03:01-B1*03:02L
ASFRLFARTR

SEQ ID NO: 25195 - protein, 10 aa, Severe acute respiratory syndrome coronavirus 2
  REGION 1..10: note = Table B: HLA-DQA1*03:01-B1*03:02L HLA-DQA1*01:03-B1*06:01L HLA-DQA1*02:01-B1*03:03L
GAVILRGHLR

SEQ ID NO: 25196 - protein, 10 aa, Severe acute respiratory syndrome coronavirus 2
  REGION 1..10: note = Table B: HLA-DQA1*03:01-B1*03:02L
PKEITVATSR

SEQ ID NO: 25197 - protein, 10 aa, Severe acute respiratory syndrome coronavirus 2
  REGION 1..10: note = Table B: HLA-DQA1*03:01-B1*03:02L
ATSRTLSYYK

SEQ ID NO: 25198 - protein, 10 aa, Severe acute respiratory syndrome coronavirus 2
  REGION 1..10: note = Table B: HLA-DQA1*03:01-B1*03:02L
ASQRVAGDSG

SEQ ID NO: 25199 - protein, 10 aa, Severe acute respiratory syndrome coronavirus 2
  REGION 1..10: note = Table B: HLA-DQA1*03:01-B1*03:02L HLA-DQA1*02:01-B1*03:03L
GDSGFAAYSR

SEQ ID NO: 25200 - protein, 10 aa, Severe acute respiratory syndrome coronavirus 2
  REGION 1..10: note = Table B: HLA-DQA1*03:01-B1*03:02L
IGNYKLNTDH

SEQ ID NO: 25201 - protein, 10 aa, Severe acute respiratory syndrome coronavirus 2
  REGION 1..10: note = Table B: HLA-DQA1*03:01-B1*03:02L
NLSKSLTENK

SEQ ID NO: 25202 - protein, 12 aa, Severe acute respiratory syndrome coronavirus 2
  REGION 1..12: note = Table B: HLA-DQA1*03:01-B1*03:02L
LSKSLTENKYSQ

SEQ ID NO: 25203 - protein, 12 aa, Severe acute respiratory syndrome coronavirus 2
  REGION 1..12: note = Table B: HLA-DQA1*03:01-B1*03:02L
TENKYSQLDEEQ

SEQ ID NO: 25204 - protein, 10 aa, Severe acute respiratory syndrome coronavirus 2
  REGION 1..10: note = Table B: HLA-DQA1*03:01-B1*03:02L
GTYEGNSPFH

SEQ ID NO: 25205 - protein, 10 aa, Severe acute respiratory syndrome coronavirus 2
  REGION 1..10: note = Table B: HLA-DQA1*03:01-B1*03:02L HLA-DQA1*02:01-B1*03:03L
NSPFHPLADN

SEQ ID NO: 25206 - protein, 11 aa, Severe acute respiratory syndrome coronavirus 2
  REGION 1..11: note = Table B: HLA-DQA1*03:01-B1*03:02L
PFHPLADNKFA

SEQ ID NO: 25207 - protein, 13 aa, Severe acute respiratory syndrome coronavirus 2
  REGION 1..13: note = Table B: HLA-DQA1*03:01-B1*03:02L HLA-DQA1*02:01-B1*03:03L
YSKWYIRVGARKS

SEQ ID NO: 25208 - protein, 11 aa, Severe acute respiratory syndrome coronavirus 2
  REGION 1..11: note = Table B: HLA-DQA1*03:01-B1*03:02L
VGARKSAPLIE

SEQ ID NO: 25209 - protein, 12 aa, Severe acute respiratory syndrome coronavirus 2
  REGION 1..12: note = Table B: HLA-DQA1*03:01-B1*03:02L
GSKSPIQYIDIG

SEQ ID NO: 25210 - protein, 12 aa, Severe acute respiratory syndrome coronavirus 2
  REGION 1..12: note = Table B: HLA-DQA1*03:01-B1*03:02L HLA-DQA1*02:01-B1*03:03L
SKSPIQYIDIGN

SEQ ID NO: 25211 - protein, 12 aa, Severe acute respiratory syndrome coronavirus 2
  REGION 1..12: note = Table B: HLA-DQA1*03:01-B1*03:02L
SDNGPQNQRNAP

SEQ ID NO: 25212 - protein, 13 aa, Severe acute respiratory syndrome coronavirus 2
  REGION 1..13: note = Table B: HLA-DQA1*03:01-B1*03:02L
FGGPSDSTGSNQN

SEQ ID NO: 25213 - protein, 11 aa, Severe acute respiratory syndrome coronavirus 2
  REGION 1..11: note = Table B: HLA-DQA1*03:01-B1*03:02L
GERSGARSKQR

SEQ ID NO: 25214 - protein, 14 aa, Severe acute respiratory syndrome coronavirus 2
  REGION 1..14: note = Table B: HLA-DQA1*03:01-B1*03:02L
LPNNTASWFTALTQ

SEQ ID NO: 25215 - protein, 13 aa, Severe acute respiratory syndrome coronavirus 2
  REGION 1..13: note = Table B: HLA-DQA1*03:01-B1*03:02L
TQHGKEDLKFPRG

SEQ ID NO: 25216 - protein, 13 aa, Severe acute respiratory syndrome coronavirus 2
  REGION 1..13: note = Table B: HLA-DQA1*03:01-B1*03:02L HLA-DRB1*14:17L
GQGVPINTNSSPD

SEQ ID NO: 25217 - protein, 11 aa, Severe acute respiratory syndrome coronavirus 2
  REGION 1..11: note = Table B: HLA-DQA1*03:01-B1*03:02L
DQIGYYRRATR

SEQ ID NO: 25218 - protein, 10 aa, Severe acute respiratory syndrome coronavirus 2
  REGION 1..10: note = Table B: HLA-DQA1*03:01-B1*03:02L
RIRGGDGKMK

SEQ ID NO: 25219 - protein, 11 aa, Severe acute respiratory syndrome coronavirus 2
  REGION 1..11: note = Table B: HLA-DQA1*03:01-B1*03:02L
GTGPEAGLPYG

SEQ ID NO: 25220 - protein, 11 aa, Severe acute respiratory syndrome coronavirus 2
  REGION 1..11: note = Table B: HLA-DQA1*03:01-B1*03:02L
PEAGLPYGANK

SEQ ID NO: 25221 - protein, 10 aa, Severe acute respiratory syndrome coronavirus 2
  REGION 1..10: note = Table B: HLA-DQA1*03:01-B1*03:02L
NTPKDHIGTR

SEQ ID NO: 25222 - protein, 12 aa, Severe acute respiratory syndrome coronavirus 2
  REGION 1..12: note = Table B: HLA-DQA1*03:01-B1*03:02L
TPKDHIGTRNPA

SEQ ID NO: 25223 - protein, 10 aa, Severe acute respiratory syndrome coronavirus 2
  REGION 1..10: note = Table B: HLA-DQA1*03:01-B1*03:02L
DHIGTRNPAN

SEQ ID NO: 25224 - protein, 12 aa, Severe acute respiratory syndrome coronavirus 2
  REGION 1..12: note = Table B: HLA-DQA1*03:01-B1*03:02L
RNPANNAAIVLQ

SEQ ID NO: 25225 - protein, 11 aa, Severe acute respiratory syndrome coronavirus 2
  REGION 1..11: note = Table B: HLA-DQA1*03:01-B1*03:02L
LPKGFYAEGSR

SEQ ID NO: 25226 - protein, 10 aa, Severe acute respiratory syndrome coronavirus 2
  REGION 1..10: note = Table B: HLA-DQA1*03:01-B1*03:02L
SRGGSQASSR

SEQ ID NO: 25227 - protein, 10 aa, Severe acute respiratory syndrome coronavirus 2
  REGION 1..10: note = Table B: HLA-DQA1*03:01-B1*03:02L
SQASSRSSSR

SEQ ID NO: 25228 - protein, 10 aa, Severe acute respiratory syndrome coronavirus 2
  REGION 1..10: note = Table B: HLA-DQA1*03:01-B1*03:02L
GSSRGTSPAR

SEQ ID NO: 25229 - protein, 10 aa, Severe acute respiratory syndrome coronavirus 2
  REGION 1..10: note = Table B: HLA-DQA1*03:01-B1*03:02L
NQLESKMSGK

SEQ ID NO: 25230 - protein, 12 aa, Severe acute respiratory syndrome coronavirus 2
  REGION 1..12: note = Table B: HLA-DQA1*03:01-B1*03:02L
GKGQQQQGQTVT

SEQ ID NO: 25231 - protein, 11 aa, Severe acute respiratory syndrome coronavirus 2
  REGION 1..11: note = Table B: HLA-DQA1*03:01-B1*03:02L
VTKKSAAEASK

SEQ ID NO: 25232 - protein, 12 aa, Severe acute respiratory syndrome coronavirus 2
  REGION 1..12: note = Table B: HLA-DQA1*03:01-B1*03:02L
TKKSAAEASKKP

SEQ ID NO: 25233 - protein, 10 aa, Severe acute respiratory syndrome coronavirus 2
  REGION 1..10: note = Table B: HLA-DQA1*03:01-B1*03:02L
AAEASKKPRQ

SEQ ID NO: 25234 - protein, 10 aa, Severe acute respiratory syndrome coronavirus 2
  REGION 1..10: note = Table B: HLA-DQA1*03:01-B1*03:02L
DQELIRQGTD

SEQ ID NO: 25235 - protein, 13 aa, Severe acute respiratory syndrome coronavirus 2
  REGION 1..13: note = Table B: HLA-DQA1*03:01-B1*03:02L
FGMSRIGMEVTPS

SEQ ID NO: 25236 - protein, 10 aa, Severe acute respiratory syndrome coronavirus 2
  REGION 1..10: note = Table B: HLA-DQA1*03:01-B1*03:02L
KLDDKDPNFK

SEQ ID NO: 25237 - protein, 10 aa, Severe acute respiratory syndrome coronavirus 2
  REGION 1..10: note = Table B: HLA-DQA1*03:01-B1*03:02L
DDKDPNFKDQ

SEQ ID NO: 25238 - protein, 10 aa, Severe acute respiratory syndrome coronavirus 2
  REGION 1..10: note = Table B: HLA-DQA1*03:01-B1*03:02L
QVILLNKHID

SEQ ID NO: 25239 - protein, 10 aa, Severe acute respiratory syndrome coronavirus 2
  REGION 1..10: note = Table B: HLA-DQA1*03:01-B1*03:02L
TFPPTEPKKD

SEQ ID NO: 25240 - protein, 10 aa, Severe acute respiratory syndrome coronavirus 2
  REGION 1..10: note = Table B: HLA-DQA1*03:01-B1*03:02L
FPPTEPKKDK

SEQ ID NO: 25241 - protein, 10 aa, Severe acute respiratory syndrome coronavirus 2
  REGION 1..10: note = Table B: HLA-DQA1*03:01-B1*03:02L
VTLLPAADLD

SEQ ID NO: 25242 - protein, 10 aa, Severe acute respiratory syndrome coronavirus 2
  REGION 1..10: note = Table B: HLA-DQA1*03:01-B1*03:02L
TLLPAADLDD

SEQ ID NO: 25243 - protein, 12 aa, Severe acute respiratory syndrome coronavirus 2
  REGION 1..12: note = Table B: HLA-DQA1*03:01-B1*03:02L
LQQSMSSADSTQ

SEQ ID NO: 25244 - protein, 12 aa, Severe acute respiratory syndrome coronavirus 2
  REGION 1..12: note = Table B: HLA-DRB1*14:54L
DSIIIGGAKLKA

SEQ ID NO: 25245 - protein, 13 aa, Severe acute respiratory syndrome coronavirus 2
  REGION 1..13: note = Table B: HLA-DRB1*14:54L
GGGVAGALNKATN

SEQ ID NO: 25246 - protein, 12 aa, Severe acute respiratory syndrome coronavirus 2
  REGION 1..12: note = Table B: HLA-DRB1*14:54L
EQKIAEIPKEEV

SEQ ID NO: 25247 - protein, 12 aa, Severe acute respiratory syndrome coronavirus 2
  REGION 1..12: note = Table B: HLA-DRB1*14:54L HLA-DRB1*16:01L
ASLINTLNDLNE

SEQ ID NO: 25248 - protein, 12 aa, Severe acute respiratory syndrome coronavirus 2
  REGION 1..12: note = Table B: HLA-DRB1*14:54L
NAQVAKSHNIAL

SEQ ID NO: 25249 - protein, 11 aa, Severe acute respiratory syndrome coronavirus 2
  REGION 1..11: note = Table B: HLA-DRB1*14:54L
VLTLDNQDLNG

SEQ ID NO: 25250 - protein, 15 aa, Severe acute respiratory syndrome coronavirus 2
  REGION 1..15: note = Table B: HLA-DRB1*14:54L
YDYYRYNLPTMCDIR

SEQ ID NO: 25251 - protein, 11 aa, Severe acute respiratory syndrome coronavirus 2
  REGION 1..11: note = Table B: HLA-DRB1*14:54L
TVVIGTSKFYG

SEQ ID NO: 25252 - protein, 13 aa, Severe acute respiratory syndrome coronavirus 2
  REGION 1..13: note = Table B: HLA-DRB1*14:54L
GSLYVKPGGTSSG

SEQ ID NO: 25253 - protein, 11 aa, Severe acute respiratory syndrome coronavirus 2
  REGION 1..11: note = Table B: HLA-DRB1*14:54L
HVISTSHKLVL

SEQ ID NO: 25254 - protein, 11 aa, Severe acute respiratory syndrome coronavirus 2
  REGION 1..11: note = Table B: HLA-DRB1*14:54L
VISTSHKLVLS

SEQ ID NO: 25255 - protein, 11 aa, Severe acute respiratory syndrome coronavirus 2
  REGION 1..11: note = Table B: HLA-DRB1*14:54L
SALVYDNKLKA

SEQ ID NO: 25256 - protein, 13 aa, Severe acute respiratory syndrome coronavirus 2
  REGION 1..13: note = Table B: HLA-DRB1*14:54L
VDGVVQQLPETYF

SEQ ID NO: 25257 - protein, 12 aa, Severe acute respiratory syndrome coronavirus 2
  REGION 1..12: note = Table B: HLA-DRB1*14:54L
GVVQQLPETYFT

SEQ ID NO: 25258 - protein, 12 aa, Severe acute respiratory syndrome coronavirus 2
  REGION 1..12: note = Table B: HLA-DRB1*14:54L
TGVLTESNKKFL

SEQ ID NO: 25259 - protein, 12 aa, Severe acute respiratory syndrome coronavirus 2
  REGION 1..12: note = Table B: HLA-DRB1*14:54L
ADQLTPTWRVYS

SEQ ID NO: 25260 - protein, 12 aa, Severe acute respiratory syndrome coronavirus 2
  REGION 1..12: note = Table B: HLA-DRB1*14:54L
QEVFAQVKQIYK

SEQ ID NO: 25261 - protein, 12 aa, Severe acute respiratory syndrome coronavirus 2
  REGION 1..12: note = Table B: HLA-DRB1*14:54L
NGIGVTQNVLYE

SEQ ID NO: 25262 - protein, 12 aa, Severe acute respiratory syndrome coronavirus 2
  REGION 1..12: note = Table B: HLA-DRB1*14:54L
AQALNTLVKQLS

SEQ ID NO: 25263 - protein, 14 aa, Severe acute respiratory syndrome coronavirus 2
  REGION 1..14: note = Table B: HLA-DPA1*01:03-B1*02:01L
FKLVNKFLALCADS

SEQ ID NO: 25264 - protein, 17 aa, Severe acute respiratory syndrome coronavirus 2
  REGION 1..17: note = Table B: HLA-DPA1*01:03-B1*02:01L HLA-DRB1*04:08L
TPVCINGLMLLEIKDTE

SEQ ID NO: 25265 - protein, 16 aa, Severe acute respiratory syndrome coronavirus 2
  REGION 1..16: note = Table B: HLA-DPA1*01:03-B1*02:01L
APNMMVTNNTFTLKGG

SEQ ID NO: 25266 - protein, 19 aa, Severe acute respiratory syndrome coronavirus 2
  REGION 1..19: note = Table B: HLA-DPA1*01:03-B1*02:01L
VKPTVVVNAANVYLKHGGG

SEQ ID NO: 25267 - protein, 16 aa, Severe acute respiratory syndrome coronavirus 2
  REGION 1..16: note = Table B: HLA-DPA1*01:03-B1*02:01L
LAPLLSAGIFGADPIH

SEQ ID NO: 25268 - protein, 16 aa, Severe acute respiratory syndrome coronavirus 2
  REGION 1..16: note = Table B: HLA-DPA1*01:03-B1*02:01L
APLLSAGIFGADPIHS

SEQ ID NO: 25269 - protein, 14 aa, Severe acute respiratory syndrome coronavirus 2
  REGION 1..14: note = Table B: HLA-DPA1*01:03-B1*02:01L
AVFDKNLYDKLVSS

SEQ ID NO: 25270 - protein, 14 aa, Severe acute respiratory syndrome coronavirus 2
  REGION 1..14: note = Table B: HLA-DPA1*01:03-B1*02:01L
YDKLVSSFLEMKSE

SEQ ID NO: 25271 - protein, 18 aa, Severe acute respiratory syndrome coronavirus 2
  REGION 1..18: note = Table B: HLA-DPA1*01:03-B1*02:01L
VVDYGARFYFYTSKTTVA

SEQ ID NO: 25272 - protein, 13 aa, Severe acute respiratory syndrome coronavirus 2
  REGION 1..13: note = Table B: HLA-DPA1*01:03-B1*02:01L HLA-DPA1*01:03-B1*104:01L
VFTTVDNINLHTQ

SEQ ID NO: 25273 - protein, 17 aa, Severe acute respiratory syndrome coronavirus 2
  REGION 1..17: note = Table B: HLA-DPA1*01:03-B1*02:01L
TALLTLQQIELKFNPPA

SEQ ID NO: 25274 - protein, 17 aa, Severe acute respiratory syndrome coronavirus 2
  REGION 1..17: note = Table B: HLA-DPA1*01:03-B1*02:01L
GVEAVMYMGTLSYEQFK

SEQ ID NO: 25275 - protein, 12 aa, Severe acute respiratory syndrome coronavirus 2
  REGION 1..12: note = Table B: HLA-DPA1*01:03-B1*02:01L
SYTTTIKPVTYK

SEQ ID NO: 25276 - protein, 19 aa, Severe acute respiratory syndrome coronavirus 2
  REGION 1..19: note = Table B: HLA-DPA1*01:03-B1*02:01L
KPIVWHVNNATNKATYKPN

SEQ ID NO: 25277 - protein, 13 aa, Severe acute respiratory syndrome coronavirus 2
  REGION 1..13: note = Table B: HLA-DPA1*01:03-B1*02:01L
AYVDNSSLTIKKP

SEQ ID NO: 25278 - protein, 13 aa, Severe acute respiratory syndrome coronavirus 2
  REGION 1..13: note = Table B: HLA-DPA1*01:03-B1*02:01L
NKVVSTTTNIVTR

SEQ ID NO: 25279 - protein, 13 aa, Severe acute respiratory syndrome coronavirus 2
  REGION 1..13: note = Table B: HLA-DPA1*01:03-B1*02:01L
GGSYTNDKACPLI

SEQ ID NO: 25280 - protein, 15 aa, Severe acute respiratory syndrome coronavirus 2
  REGION 1..15: note = Table B: HLA-DPA1*01:03-B1*02:01L
AVNLLTNMFTPLIQP

SEQ ID NO: 25281 - protein, 14 aa, Severe acute respiratory syndrome coronavirus 2
  REGION 1..14: note = Table B: HLA-DPA1*01:03-B1*02:01L
FLLNKEMYLKLRSD

SEQ ID NO: 25282 - protein, 15 aa, Severe acute respiratory syndrome coronavirus 2
  REGION 1..15: note = Table B: HLA-DPA1*01:03-B1*02:01L
QSGFRKMAFPSGKVE

SEQ ID NO: 25283 - protein, 13 aa, Severe acute respiratory syndrome coronavirus 2
  REGION 1..13: note = Table B: HLA-DPA1*01:03-B1*02:01L
GDRWFLNRFTTTL

SEQ ID NO: 25284 - protein, 15 aa, Severe acute respiratory syndrome coronavirus 2
  REGION 1..15: note = Table B: HLA-DPA1*01:03-B1*02:01L
SALLEDEFTPFDVVR

SEQ ID NO: 25285 - protein, 19 aa, Severe acute respiratory syndrome coronavirus 2
  REGION 1..19: note = Table B: HLA-DPA1*01:03-B1*02:01L
DDGARRVWTLMNVLTLVYK

SEQ ID NO: 25286 - protein, 15 aa, Severe acute respiratory syndrome coronavirus 2
  REGION 1..15: note = Table B: HLA-DPA1*01:03-B1*02:01L
AAKLMVVIPDYNTYK

SEQ ID NO: 25287 - protein, 16 aa, Severe acute respiratory syndrome coronavirus 2
  REGION 1..16: note = Table B: HLA-DPA1*01:03-B1*02:01L
ANSAVKLQNNELSPVA

SEQ ID NO: 25288 - protein, 17 aa, Severe acute respiratory syndrome coronavirus 2
  REGION 1..17: note = Table B: HLA-DPA1*01:03-B1*02:01L HLA-DPA1*01:03-B1*104:01L
EERLKLFDRYFKYWDQT

SEQ ID NO: 25289 - protein, 16 aa, Severe acute respiratory syndrome coronavirus 2
  REGION 1..16: note = Table B: HLA-DPA1*01:03-B1*02:01L HLA-DPA1*01:03-B1*104:01L
FNVLFSTVFPPTSFGP

SEQ ID NO: 25290 - protein, 18 aa, Severe acute respiratory syndrome coronavirus 2
  REGION 1..18: note = Table B: HLA-DPA1*01:03-B1*02:01L
DGNAAISDYDYYRYNLPT

SEQ ID NO: 25291 - protein, 12 aa, Severe acute respiratory syndrome coronavirus 2
  REGION 1..12: note = Table B: HLA-DPA1*01:03-B1*02:01L HLA-DRB1*04:08L
AYANSVFNICQA

SEQ ID NO: 25292 - protein, 12 aa, Severe acute respiratory syndrome coronavirus 2
  REGION 1..12: note = Table B: HLA-DPA1*01:03-B1*02:01L
KLFAAETLKATE

SEQ ID NO: 25293 - protein, 12 aa, Severe acute respiratory syndrome coronavirus 2
  REGION 1..12: note = Table B: HLA-DPA1*01:03-B1*02:01L
NYVFTGYRVTKN

SEQ ID NO: 25294 - protein, 16 aa, Severe acute respiratory syndrome coronavirus 2
  REGION 1..16: note = Table B: HLA-DPA1*01:03-B1*02:01L
VFTGYRVTKNSKVQIG

SEQ ID NO: 25295 - protein, 14 aa, Severe acute respiratory syndrome coronavirus 2
  REGION 1..14: note = Table B: HLA-DPA1*01:03-B1*02:01L HLA-DRB1*16:01L HLA-DRB1*04:08L
KLNVGDYFVLTSHT

SEQ ID NO: 25296 - protein, 13 aa, Severe acute respiratory syndrome coronavirus 2
  REGION 1..13: note = Table B: HLA-DPA1*01:03-B1*02:01L
FAIGLALYYPSAR

SEQ ID NO: 25297 - protein, 15 aa, Severe acute respiratory syndrome coronavirus 2
  REGION 1..15: note = Table B: HLA-DPA1*01:03-B1*02:01L
VNSTLEQYVFCTVNA

SEQ ID NO: 25298 - protein, 12 aa, Severe acute respiratory syndrome coronavirus 2
  REGION 1..12: note = Table B: HLA-DPA1*01:03-B1*02:01L
TLEPEYFNSVCR

SEQ ID NO: 25299 - protein, 14 aa, Severe acute respiratory syndrome coronavirus 2
  REGION 1..14: note = Table B: HLA-DPA1*01:03-B1*02:01L HLA-DRB1*08:02L
YDYVIFTQTTETAH

SEQ ID NO: 25300 - protein, 13 aa, Severe acute respiratory syndrome coronavirus 2
  REGION 1..13: note = Table B: HLA-DPA1*01:03-B1*02:01L HLA-DPA1*01:02-B1*04:01L
YVIFTQTTETAHS

SEQ ID NO: 25301 - protein, 13 aa, Severe acute respiratory syndrome coronavirus 2
  REGION 1..13: note = Table B: HLA-DPA1*01:03-B1*02:01L
LELAMDEFIERYK

SEQ ID NO: 25302 - protein, 14 aa, Severe acute respiratory syndrome coronavirus 2
  REGION 1..14: note = Table B: HLA-DPA1*01:03-B1*02:01L
MDEFIERYKLEGYA

SEQ ID NO: 25303 - protein, 14 aa, Severe acute respiratory syndrome coronavirus 2
  REGION 1..14: note = Table B: HLA-DPA1*01:03-B1*02:01L
EISFMLWCKDGHVE

SEQ ID NO: 25304 - protein, 14 aa, Severe acute respiratory syndrome coronavirus 2
  REGION 1..14: note = Table B: HLA-DPA1*01:03-B1*02:01L
IFWRNTNPIQLSSY

SEQ ID NO: 25305 - protein, 16 aa, Severe acute respiratory syndrome coronavirus 2
  REGION 1..16: note = Table B: HLA-DPA1*01:03-B1*02:01L
LPFNDGVYFASTEKSN

SEQ ID NO: 25306 - protein, 13 aa, Severe acute respiratory syndrome coronavirus 2
  REGION 1..13: note = Table B: HLA-DPA1*01:03-B1*02:01L
KSWMESEFRVYSS

SEQ ID NO: 25307 - protein, 12 aa, Severe acute respiratory syndrome coronavirus 2
  REGION 1..12: note = Table B: HLA-DPA1*01:03-B1*02:01L
PIGINITRFQTL

SEQ ID NO: 25308 - protein, 13 aa, Severe acute respiratory syndrome coronavirus 2
  REGION 1..13: note = Table B: HLA-DPA1*01:03-B1*02:01L
SFTVEKGIYQTSN

SEQ ID NO: 25309 - protein, 13 aa, Severe acute respiratory syndrome coronavirus 2
  REGION 1..13: note = Table B: HLA-DPA1*01:03-B1*02:01L
KGIYQTSNFRVQP

SEQ ID NO: 25310 - protein, 15 aa, Severe acute respiratory syndrome coronavirus 2
  REGION 1..15: note = Table B: HLA-DPA1*01:03-B1*02:01L
NATRFASVYAWNRKR

SEQ ID NO: 25311 - protein, 17 aa, Severe acute respiratory syndrome coronavirus 2
  REGION 1..17: note = Table B: HLA-DPA1*01:03-B1*02:01L
AENSVAYSNNSIAIPTN

SEQ ID NO: 25312 - protein, 16 aa, Severe acute respiratory syndrome coronavirus 2
  REGION 1..16: note = Table B: HLA-DPA1*01:03-B1*02:01L HLA-DRB1*08:02L
DAGFIKQYGDCLGDIA

SEQ ID NO: 25313 - protein, 13 aa, Severe acute respiratory syndrome coronavirus 2
  REGION 1..13: note = Table B: HLA-DPA1*01:03-B1*02:01L
IDRLITGRLQSLQ

SEQ ID NO: 25314 - protein, 14 aa, Severe acute respiratory syndrome coronavirus 2
  REGION 1..14: note = Table B: HLA-DPA1*01:03-B1*02:01L
PLLYDANYFLCWHT

SEQ ID NO: 25315 - protein, 13 aa, Severe acute respiratory syndrome coronavirus 2
  REGION 1..13: note = Table B: HLA-DPA1*01:03-B1*02:01L HLA-DRB1*08:03L
FYVYSRVKNLNSS

SEQ ID NO: 25316 - protein, 14 aa, Severe acute respiratory syndrome coronavirus 2
  REGION 1..14: note = Table B: HLA-DPA1*01:03-B1*02:01L HLA-DRB1*15:03L
VGLMWLSYFIASFR

SEQ ID NO: 25317 - protein, 14 aa, Severe acute respiratory syndrome coronavirus 2
  REGION 1..14: note = Table B: HLA-DPA1*01:03-B1*02:01L
VQELYSPIFLIVAA

SEQ ID NO: 25318 - protein, 15 aa, Severe acute respiratory syndrome coronavirus 2
  REGION 1..15: note = Table B: HLA-DPA1*01:03-B1*02:01L
GIIWVATEGALNTPK

SEQ ID NO: 25319 - protein, 17 aa, Severe acute respiratory syndrome coronavirus 2
  REGION 1..17: note = Table B: HLA-DPA1*01:03-B1*104:01L
LPVLQVRDVLVRGFGDS

SEQ ID NO: 25320 - protein, 16 aa, Severe acute respiratory syndrome coronavirus 2
  REGION 1..16: note = Table B: HLA-DPA1*01:03-B1*104:01L
SVEEVLSEARQHLKDG

SEQ ID NO: 25321 - protein, 13 aa, Severe acute respiratory syndrome coronavirus 2
  REGION 1..13: note = Table B: HLA-DPA1*01:03-B1*104:01L
LEGIQYGRSGETL

SEQ ID NO: 25322 - protein, 16 aa, Severe acute respiratory syndrome coronavirus 2
  REGION 1..16: note = Table B: HLA-DPA1*01:03-B1*104:01L
IQYGRSGETLGVLVPH

SEQ ID NO: 25323 - protein, 15 aa, Severe acute respiratory syndrome coronavirus 2
  REGION 1..15: note = Table B: HLA-DPA1*01:03-B1*104:01L HLA-DRB1*07:01L
GGHSYGADLKSFDLG

SEQ ID NO: 25324 - protein, 11 aa, Severe acute respiratory syndrome coronavirus 2
  REGION 1..11: note = Table B: HLA-DPA1*01:03-B1*104:01L
YELQTPFEIKL

SEQ ID NO: 25325 - protein, 15 aa, Severe acute respiratory syndrome coronavirus 2
  REGION 1..15: note = Table B: HLA-DPA1*01:03-B1*104:01L
LDYKAFKQIVESCGN

SEQ ID NO: 25326 - protein, 14 aa, Severe acute respiratory syndrome coronavirus 2
  REGION 1..14: note = Table B: HLA-DPA1*01:03-B1*104:01L HLA-DRB1*07:01L
NSVRVLQKAAITIL

SEQ ID NO: 25327 - protein, 14 aa, Severe acute respiratory syndrome coronavirus 2
  REGION 1..14: note = Table B: HLA-DPA1*01:03-B1*104:01L
LVNKFLALCADSII

SEQ ID NO: 25328 - protein, 15 aa, Severe acute respiratory syndrome coronavirus 2
  REGION 1..15: note = Table B: HLA-DPA1*01:03-B1*104:01L HLA-DQA1*05:05-B1*03:01L HLA-DRB1*04:08L
GAKLKALNLGETFVT

SEQ ID NO: 25329 - protein, 13 aa, Severe acute respiratory syndrome coronavirus 2
  REGION 1..13: note = Table B: HLA-DPA1*01:03-B1*104:01L
TGLLMPLKAPKEI

SEQ ID NO: 25330 - protein, 17 aa, Severe acute respiratory syndrome coronavirus 2
  REGION 1..17: note = Table B: HLA-DPA1*01:03-B1*104:01L
ERIDKVLNEKCSAYTVE

SEQ ID NO: 25331 - protein, 13 aa, Severe acute respiratory syndrome coronavirus 2
  REGION 1..13: note = Table B: HLA-DPA1*01:03-B1*104:01L
AVIKTLQPVSELL

SEQ ID NO: 25332 - protein, 16 aa, Severe acute respiratory syndrome coronavirus 2
  REGION 1..16: note = Table B: HLA-DPA1*01:03-B1*104:01L
LQPVSELLTPLGIDLD

SEQ ID NO: 25333 - protein, 13 aa, Severe acute respiratory syndrome coronavirus 2
  REGION 1..13: note = Table B: HLA-DPA1*01:03-B1*104:01L
ALNKATNNAMQVE

SEQ ID NO: 25334 - protein, 14 aa, Severe acute respiratory syndrome coronavirus 2
  REGION 1..14: note = Table B: HLA-DPA1*01:03-B1*104:01L
VESDDYIATNGPLK

SEQ ID NO: 25335 - protein, 13 aa, Severe acute respiratory syndrome coronavirus 2
  REGION 1..13: note = Table B: HLA-DPA1*01:03-B1*104:01L HLA-DRB1*07:01L
YTSKTTVASLINT

SEQ ID NO: 25336 - protein, 16 aa, Severe acute respiratory syndrome coronavirus 2
  REGION 1..16: note = Table B: HLA-DPA1*01:03-B1*104:01L
MPLGYVTHGLNLEEAA

SEQ ID NO: 25337 - protein, 16 aa, Severe acute respiratory syndrome coronavirus 2
  REGION 1..16: note = Table B: HLA-DPA1*01:03-B1*104:01L HLA-DPA1*01:02-B1*04:01L
AVTAYNGYLTSSSKTP

SEQ ID NO: 25338 - protein, 16 aa, Severe acute respiratory syndrome coronavirus 2
  REGION 1..16: note = Table B: HLA-DPA1*01:03-B1*104:01L
VITFDNLKTLLSLREV

SEQ ID NO: 25339 - protein, 13 aa, Severe acute respiratory syndrome coronavirus 2
  REGION 1..13: note = Table B: HLA-DPA1*01:03-B1*104:01L
RARAGEAANFCAL

SEQ ID NO: 25340 - protein, 18 aa, Severe acute respiratory syndrome coronavirus 2
  REGION 1..18: note = Table B: HLA-DPA1*01:03-B1*104:01L
ELKHGTFTCASEYTGNYQ

SEQ ID NO: 25341 - protein, 16 aa, Severe acute respiratory syndrome coronavirus 2
  REGION 1..16: note = Table B: HLA-DPA1*01:03-B1*104:01L
HYKHITSKETLYCIDG

SEQ ID NO: 25342 - protein, 17 aa, Severe acute respiratory syndrome coronavirus 2
  REGION 1..17: note = Table B: HLA-DPA1*01:03-B1*104:01L
YKHITSKETLYCIDGAL

SEQ ID NO: 25343 - protein, 13 aa, Severe acute respiratory syndrome coronavirus 2
  REGION 1..13: note = Table B: HLA-DPA1*01:03-B1*104:01L
LVPNQPYPNASFD

SEQ ID NO: 25344 - protein, 11 aa, Severe acute respiratory syndrome coronavirus 2
  REGION 1..11: note = Table B: HLA-DPA1*01:03-B1*104:01L
GDVVAIDYKHY

SEQ ID NO: 25345 - protein, 16 aa, Severe acute respiratory syndrome coronavirus 2
  REGION 1..16: note = Table B: HLA-DPA1*01:03-B1*104:01L
DTIANYAKPFLNKVVS

SEQ ID NO: 25346 - protein, 11 aa, Severe acute respiratory syndrome coronavirus 2
  REGION 1..11: note = Table B: HLA-DPA1*01:03-B1*104:01L
MAPISAMVRMY

SEQ ID NO: 25347 - protein, 16 aa, Severe acute respiratory syndrome coronavirus 2
  REGION 1..16: note = Table B: HLA-DPA1*01:03-B1*104:01L
VNGVRRSFYVYANGGK

SEQ ID NO: 25348 - protein, 15 aa, Severe acute respiratory syndrome coronavirus 2
  REGION 1..15: note = Table B: HLA-DPA1*01:03-B1*104:01L
GVRRSFYVYANGGKG

SEQ ID NO: 25349 - protein, 16 aa, Severe acute respiratory syndrome coronavirus 2
  REGION 1..16: note = Table B: HLA-DPA1*01:03-B1*104:01L
DQSSYIVDSVTVKNGS

SEQ ID NO: 25350 - protein, 15 aa, Severe acute respiratory syndrome coronavirus 2
  REGION 1..15: note = Table B: HLA-DPA1*01:03-B1*104:01L
NNTKGSLPINVIVFD

SEQ ID NO: 25351 - protein, 18 aa, Severe acute respiratory syndrome coronavirus 2
  REGION 1..18: note = Table B: HLA-DPA1*01:03-B1*104:01L
NTKGSLPINVIVFDGKSK

SEQ ID NO: 25352 - protein, 11 aa, Severe acute respiratory syndrome coronavirus 2
  REGION 1..11: note = Table B: HLA-DPA1*01:03-B1*104:01L HLA-DRB1*15:03L
ATAEAELAKNV

SEQ ID NO: 25353 - protein, 16 aa, Severe acute respiratory syndrome coronavirus 2
  REGION 1..16: note = Table B: HLA-DPA1*01:03-B1*104:01L
YMLTYNKVENMTPRDL

SEQ ID NO: 25354 - protein, 15 aa, Severe acute respiratory syndrome coronavirus 2
  REGION 1..15: note = Table B: HLA-DPA1*01:03-B1*104:01L
QVAKSHNIALIWNVK

SEQ ID NO: 25355 - protein, 14 aa, Severe acute respiratory syndrome coronavirus 2
  REGION 1..14: note = Table B: HLA-DPA1*01:03-B1*104:01L HLA-DQA1*01:03-B1*06:01L
TSYREAACCHLAKA

SEQ ID NO: 25356 - protein, 15 aa, Severe acute respiratory syndrome coronavirus 2
  REGION 1..15: note = Table B: HLA-DPA1*01:03-B1*104:01L
HLAKALNDFSNSGSD

SEQ ID NO: 25357 - protein, 16 aa, Severe acute respiratory syndrome coronavirus 2
  REGION 1..16: note = Table B: HLA-DPA1*01:03-B1*104:01L
LNPNYEDLLIRKSNHN

SEQ ID NO: 25358 - protein, 14 aa, Severe acute respiratory syndrome coronavirus 2
  REGION 1..14: note = Table B: HLA-DPA1*01:03-B1*104:01L HLA-DRB1*04:08L
VVTTVMFLARGIVF

SEQ ID NO: 25359 - protein, 18 aa, Severe acute respiratory syndrome coronavirus 2
  REGION 1..18: note = Table B: HLA-DPA1*01:03-B1*104:01L
GKPCIKVATVQSKMSDVK

SEQ ID NO: 25360 - protein, 15 aa, Severe acute respiratory syndrome coronavirus 2
  REGION 1..15: note = Table B: HLA-DPA1*01:03-B1*104:01L HLA-DRB1*07:01L
LSVLLSMQGAVDINK

SEQ ID NO: 25361 - protein, 11 aa, Severe acute respiratory syndrome coronavirus 2
  REGION 1..11: note = Table B: HLA-DPA1*01:03-B1*104:01L
MLDNRATLQAI

SEQ ID NO: 25362 - protein, 18 aa, Severe acute respiratory syndrome coronavirus 2
  REGION 1..18: note = Table B: HLA-DPA1*01:03-B1*104:01L
SAMQTMLFTMLRKLDNDA

SEQ ID NO: 25363 - protein, 15 aa, Severe acute respiratory syndrome coronavirus 2
  REGION 1..15: note = Table B: HLA-DPA1*01:03-B1*104:01L HLA-DRB1*15:01L
IVTALRANSAVKLQN

SEQ ID NO: 25364 - protein, 11 aa, Severe acute respiratory syndrome coronavirus 2
  REGION 1..11: note = Table B: HLA-DPA1*01:03-B1*104:01L
TACTDDNALAY

SEQ ID NO: 25365 - protein, 14 aa, Severe acute respiratory syndrome coronavirus 2
  REGION 1..14: note = Table B: HLA-DPA1*01:03-B1*104:01L HLA-DRB1*08:02L
YLYFIKGLNNLNRG

SEQ ID NO: 25366 - protein, 14 aa, Severe acute respiratory syndrome coronavirus 2
  REGION 1..14: note = Table B: HLA-DPA1*01:03-B1*104:01L HLA-DRB1*07:01L
LKGKYVQIPTTCAN

SEQ ID NO: 25367 - protein, 15 aa, Severe acute respiratory syndrome coronavirus 2
  REGION 1..15: note = Table B: HLA-DPA1*01:03-B1*104:01L HLA-DRB1*07:01L HLA-DRB1*08:02L
KGKYVQIPTTCANDP

SEQ ID NO: 25368 - protein, 15 aa, Severe acute respiratory syndrome coronavirus 2
  REGION 1..15: note = Table B: HLA-DPA1*01:03-B1*104:01L
GKYVQIPTTCANDPV

SEQ ID NO: 25369 - protein, 15 aa, Severe acute respiratory syndrome coronavirus 2
  REGION 1..15: note = Table B: HLA-DPA1*01:03-B1*104:01L HLA-DRB1*07:01L
VVYRAFDIYNDKVAG

SEQ ID NO: 25370 - protein, 15 aa, Severe acute respiratory syndrome coronavirus 2
  REGION 1..15: note = Table B: HLA-DPA1*01:03-B1*104:01L
NLLKDCPAVAKHDFF

SEQ ID NO: 25371 - protein, 15 aa, Severe acute respiratory syndrome coronavirus 2
  REGION 1..15: note = Table B: HLA-DPA1*01:03-B1*104:01L
FNKKDWYDFVENPDI

SEQ ID NO: 25372 - protein, 15 aa, Severe acute respiratory syndrome coronavirus 2
  REGION 1..15: note = Table B: HLA-DPA1*01:03-B1*104:01L
ILTLTRALTAESHVD

SEQ ID NO: 25373 - protein, 16 aa, Severe acute respiratory syndrome coronavirus 2
  REGION 1..16: note = Table B: HLA-DPA1*01:03-B1*104:01L
TKPYIKWDLLKYDFTE

SEQ ID NO: 25374 - protein, 16 aa, Severe acute respiratory syndrome coronavirus 2
  REGION 1..16: note = Table B: HLA-DPA1*01:03-B1*104:01L
ELGVVHNQDVNLHSSR

SEQ ID NO: 25375 - protein, 17 aa, Severe acute respiratory syndrome coronavirus 2
  REGION 1..17: note = Table B: HLA-DPA1*01:03-B1*104:01L HLA-DRB1*15:03L
DKRTTCFSVAALTNNVA

SEQ ID NO: 25376 - protein, 16 aa, Severe acute respiratory syndrome coronavirus 2
  REGION 1..16: note = Table B: HLA-DPA1*01:03-B1*104:01L
VKPGNFNKDFYDFAVS

SEQ ID NO: 25377 - protein, 16 aa, Severe acute respiratory syndrome coronavirus 2
  REGION 1..16: note = Table B: HLA-DPA1*01:03-B1*104:01L
DFAVSKGFFKEGSSVE

SEQ ID NO: 25378 - protein, 14 aa, Severe acute respiratory syndrome coronavirus 2
  REGION 1..14: note = Table B: HLA-DPA1*01:03-B1*104:01L
LFAYTKRNVIPTIT

SEQ ID NO: 25379 - protein, 14 aa, Severe acute respiratory syndrome coronavirus 2
  REGION 1..14: note = Table B: HLA-DPA1*01:03-B1*104:01L
LSHRFYRLANECAQ

SEQ ID NO: 25380 - protein, 15 aa, Severe acute respiratory syndrome coronavirus 2
  REGION 1..15: note = Table B: HLA-DPA1*01:03-B1*104:01L HLA-DQA1*05:05-B1*03:01L
TAYANSVFNICQAVT

SEQ ID NO: 25381 - protein, 16 aa, Severe acute respiratory syndrome coronavirus 2
  REGION 1..16: note = Table B: HLA-DPA1*01:03-B1*104:01L
NLQHRLYECLYRNRDV

SEQ ID NO: 25382 - protein, 18 aa, Severe acute respiratory syndrome coronavirus 2
  REGION 1..18: note = Table B: HLA-DPA1*01:03-B1*104:01L
PDPSRILGAGCFVDDIVK

SEQ ID NO: 25383 - protein, 14 aa, Severe acute respiratory syndrome coronavirus 2
  REGION 1..14: note = Table B: HLA-DPA1*01:03-B1*104:01L
FKLSYGIATVREVL

SEQ ID NO: 25384 - protein, 15 aa, Severe acute respiratory syndrome coronavirus 2
  REGION 1..15: note = Table B: HLA-DPA1*01:03-B1*104:01L
EQYVFCTVNALPETT

SEQ ID NO: 25385 - protein, 15 aa, Severe acute respiratory syndrome coronavirus 2
  REGION 1..15: note = Table B: HLA-DPA1*01:03-B1*104:01L HLA-DQA1*05:05-B1*03:01L
SALVYDNKLKAHKDK

SEQ ID NO: 25386 - protein, 14 aa, Severe acute respiratory syndrome coronavirus 2
  REGION 1..14: note = Table B: HLA-DPA1*01:03-B1*104:01L
FKMFYKGVITHDVS

SEQ ID NO: 25387 - protein, 14 aa, Severe acute respiratory syndrome coronavirus 2
  REGION 1..14: note = Table B: HLA-DPA1*01:03-B1*104:01L
WRKAVFISPYNSQN

SEQ ID NO: 25388 - protein, 13 aa, Severe acute respiratory syndrome coronavirus 2
  REGION 1..13: note = Table B: HLA-DPA1*01:03-B1*104:01L
VATLQAENVTGLF

SEQ ID NO: 25389 - protein, 12 aa, Severe acute respiratory syndrome coronavirus 2
  REGION 1..12: note = Table B: HLA-DPA1*01:03-B1*104:01L HLA-DRB1*16:01L
VDIPGIPKDMTY

SEQ ID NO: 25390 - protein, 15 aa, Severe acute respiratory syndrome coronavirus 2
  REGION 1..15: note = Table B: HLA-DPA1*01:03-B1*104:01L
STGVNLVAVPTGYVD

SEQ ID NO: 25391 - protein, 17 aa, Severe acute respiratory syndrome coronavirus 2
  REGION 1..17: note = Table B: HLA-DPA1*01:03-B1*104:01L
DQFKHLIPLMYKGLPWN

SEQ ID NO: 25392 - protein, 14 aa, Severe acute respiratory syndrome coronavirus 2
  REGION 1..14: note = Table B: HLA-DPA1*01:03-B1*104:01L
TSMKYFVKIGPERT

SEQ ID NO: 25393 - protein, 15 aa, Severe acute respiratory syndrome coronavirus 2
  REGION 1..15: note = Table B: HLA-DPA1*01:03-B1*104:01L
KVQHMVVKAALLADK

SEQ ID NO: 25394 - protein, 17 aa, Severe acute respiratory syndrome coronavirus 2
  REGION 1..17: note = Table B: HLA-DPA1*01:03-B1*104:01L
EELFYSYATHSDKFTDG

SEQ ID NO: 25395 - protein, 14 aa, Severe acute respiratory syndrome coronavirus 2
  REGION 1..14: note = Table B: HLA-DPA1*01:03-B1*104:01L
NVAFNVVNKGHFDG

SEQ ID NO: 25396 - protein, 14 aa, Severe acute respiratory syndrome coronavirus 2
  REGION 1..14: note = Table B: HLA-DPA1*01:03-B1*104:01L
IINNTVYTKVDGVD

SEQ ID NO: 25397 - protein, 15 aa, Severe acute respiratory syndrome coronavirus 2
  REGION 1..15: note = Table B: HLA-DPA1*01:03-B1*104:01L HLA-DQA1*01:03-B1*06:01L
DIAKKPTETICAPLT

SEQ ID NO: 25398 - protein, 11 aa, Severe acute respiratory syndrome coronavirus 2
  REGION 1..11: note = Table B: HLA-DPA1*01:03-B1*104:01L
TLIGEAVKTQF

SEQ ID NO: 25399 - protein, 15 aa, Severe acute respiratory syndrome coronavirus 2
  REGION 1..15: note = Table B: HLA-DPA1*01:03-B1*104:01L
TQFNYYKKVDGVVQQ

SEQ ID NO: 25400 - protein, 15 aa, Severe acute respiratory syndrome coronavirus 2
  REGION 1..15: note = Table B: HLA-DPA1*01:03-B1*104:01L
YYKKVDGVVQQLPET

SEQ ID NO: 25401 - protein, 19 aa, Severe acute respiratory syndrome coronavirus 2
  REGION 1..19: note = Table B: HLA-DPA1*01:03-B1*104:01L
PETYFTQSRNLQEFKPRSQ

SEQ ID NO: 25402 - protein, 16 aa, Severe acute respiratory syndrome coronavirus 2
  REGION 1..16: note = Table B: HLA-DPA1*01:03-B1*104:01L
IGLAKRFKESPFELED

SEQ ID NO: 25403 - protein, 15 aa, Severe acute respiratory syndrome coronavirus 2
  REGION 1..15: note = Table B: HLA-DPA1*01:03-B1*104:01L
DLLLDDFVEIIKSQD

SEQ ID NO: 25404 - protein, 11 aa, Severe acute respiratory syndrome coronavirus 2
  REGION 1..11: note = Table B: HLA-DPA1*01:03-B1*104:01L
VEIIKSQDLSV

SEQ ID NO: 25405 - protein, 16 aa, Severe acute respiratory syndrome coronavirus 2
  REGION 1..16: note = Table B: HLA-DPA1*01:03-B1*104:01L
GSVAIKITEHSWNADL

SEQ ID NO: 25406 - protein, 13 aa, Severe acute respiratory syndrome coronavirus 2
  REGION 1..13: note = Table B: HLA-DPA1*01:03-B1*104:01L HLA-DPA1*01:02-B1*04:01L HLA-DRB1*08:02L
AFVTNVNASSSEA

SEQ ID NO: 25407 - protein, 12 aa, Severe acute respiratory syndrome coronavirus 2
  REGION 1..12: note = Table B: HLA-DPA1*01:03-B1*104:01L
YIFWRNTNPIQL

SEQ ID NO: 25408 - protein, 15 aa, Severe acute respiratory syndrome coronavirus 2
  REGION 1..15: note = Table B: HLA-DPA1*01:03-B1*104:01L
IIRENNRVVISSDVL

SEQ ID NO: 25409 - protein, 14 aa, Severe acute respiratory syndrome coronavirus 2
  REGION 1..14: note = Table B: HLA-DPA1*01:03-B1*104:01L
RGVYYPDKVFRSSV

SEQ ID NO: 25410 - protein, 16 aa, Severe acute respiratory syndrome coronavirus 2
  REGION 1..16: note = Table B: HLA-DPA1*01:03-B1*104:01L
PDKVFRSSVLHSTQDL

SEQ ID NO: 25411 - protein, 11 aa, Severe acute respiratory syndrome coronavirus 2
  REGION 1..11: note = Table B: HLA-DPA1*01:03-B1*104:01L
TLDSKTQSLLI

SEQ ID NO: 25412 - protein, 13 aa, Severe acute respiratory syndrome coronavirus 2
  REGION 1..13: note = Table B: HLA-DPA1*01:03-B1*104:01L
NDPFLGVYYHKNN

SEQ ID NO: 25413 - protein, 16 aa, Severe acute respiratory syndrome coronavirus 2
  REGION 1..16: note = Table B: HLA-DPA1*01:03-B1*104:01L
EPLVDLPIGINITRFQ

SEQ ID NO: 25414 - protein, 16 aa, Severe acute respiratory syndrome coronavirus 2
  REGION 1..16: note = Table B: HLA-DPA1*01:03-B1*104:01L HLA-DRB1*08:02L HLA-DRB1*08:03L
QTLLALHRSYLTPGDS

SEQ ID NO: 25415 - protein, 11 aa, Severe acute respiratory syndrome coronavirus 2
  REGION 1..11: note = Table B: HLA-DPA1*01:03-B1*104:01L
SGWTAGAAAYY

SEQ ID NO: 25416 - protein, 15 aa, Severe acute respiratory syndrome coronavirus 2
  REGION 1..15: note = Table B: HLA-DPA1*01:03-B1*104:01L HLA-DQA1*05:05-B1*03:01L
SIVRFPNITNLCPFG

SEQ ID NO: 25417 - protein, 14 aa, Severe acute respiratory syndrome coronavirus 2
  REGION 1..14: note = Table B: HLA-DPA1*01:03-B1*104:01L HLA-DRB1*07:01L
WNRKRISNCVADYS

SEQ ID NO: 25418 - protein, 16 aa, Severe acute respiratory syndrome coronavirus 2
  REGION 1..16: note = Table B: HLA-DPA1*01:03-B1*104:01L
QPYRVVVLSFELLHAP

SEQ ID NO: 25419 - protein, 18 aa, Severe acute respiratory syndrome coronavirus 2
  REGION 1..18: note = Table B: HLA-DPA1*01:03-B1*104:01L
TGTGVLTESNKKFLPFQQ

SEQ ID NO: 25420 - protein, 16 aa, Severe acute respiratory syndrome coronavirus 2
  REGION 1..16: note = Table B: HLA-DPA1*01:03-B1*104:01L HLA-DQA1*01:03-B1*06:01L
VAVLYQDVNCTEVPVA

SEQ ID NO: 25421 - protein, 15 aa, Severe acute respiratory syndrome coronavirus 2
  REGION 1..15: note = Table B: HLA-DPA1*01:03-B1*104:01L
DQLTPTWRVYSTGSN

SEQ ID NO: 25422 - protein, 13 aa, Severe acute respiratory syndrome coronavirus 2
  REGION 1..13: note = Table B: HLA-DPA1*01:03-B1*104:01L
YTMSLGAENSVAY

SEQ ID NO: 25423 - protein, 15 aa, Severe acute respiratory syndrome coronavirus 2
  REGION 1..15: note = Table B: HLA-DPA1*01:03-B1*104:01L
GKLQDVVNQNAQALN

SEQ ID NO: 25424 - protein, 15 aa, Severe acute respiratory syndrome coronavirus 2
  REGION 1..15: note = Table B: HLA-DPA1*01:03-B1*104:01L
HFPREGVFVSNGTHW

SEQ ID NO: 25425 - protein, 15 aa, Severe acute respiratory syndrome coronavirus 2
  REGION 1..15: note = Table B: HLA-DPA1*01:03-B1*104:01L
TQRNFYEPQIITTDN

SEQ ID NO: 25426 - protein, 14 aa, Severe acute respiratory syndrome coronavirus 2
  REGION 1..14: note = Table B: HLA-DPA1*01:03-B1*104:01L
RNFYEPQIITTDNT

SEQ ID NO: 25427 - protein, 15 aa, Severe acute respiratory syndrome coronavirus 2
  REGION 1..15: note = Table B: HLA-DPA1*01:03-B1*104:01L
KYFKNHTSPDVDLGD

SEQ ID NO: 25428 - protein, 13 aa, Severe acute respiratory syndrome coronavirus 2
  REGION 1..13: note = Table B: HLA-DPA1*01:03-B1*104:01L
LLAVFQSASKIIT

SEQ ID NO: 25429 - protein, 14 aa, Severe acute respiratory syndrome coronavirus 2
  REGION 1..14: note = Table B: HLA-DPA1*01:03-B1*104:01L
LKKRWQLALSKGVH

SEQ ID NO: 25430 - protein, 14 aa, Severe acute respiratory syndrome coronavirus 2
  REGION 1..14: note = Table B: HLA-DPA1*01:03-B1*104:01L
RINWITGGIAIAMA

SEQ ID NO: 25431 - protein, 11 aa, Severe acute respiratory syndrome coronavirus 2
  REGION 1..11: note = Table B: HLA-DPA1*01:03-B1*104:01L
GDSGFAAYSRY

SEQ ID NO: 25432 - protein, 17 aa, Severe acute respiratory syndrome coronavirus 2
  REGION 1..17: note = Table B: HLA-DPA1*01:03-B1*104:01L
SKWYIRVGARKSAPLIE

SEQ ID NO: 25433 - protein, 18 aa, Severe acute respiratory syndrome coronavirus 2
  REGION 1..18: note = Table B: HLA-DPA1*01:03-B1*104:01L
APLIELCVDEAGSKSPIQ

SEQ ID NO: 25434 - protein, 13 aa, Severe acute respiratory syndrome coronavirus 2
  REGION 1..13: note = Table B: HLA-DPA1*01:03-B1*104:01L
EPKLGSLVVRCSF

SEQ ID NO: 25435 - protein, 16 aa, Severe acute respiratory syndrome coronavirus 2
  REGION 1..16: note = Table B: HLA-DPA1*01:03-B1*104:01L
GPSDSTGSNQNGERSG

SEQ ID NO: 25436 - protein, 15 aa, Severe acute respiratory syndrome coronavirus 2
  REGION 1..15: note = Table B: HLA-DPA1*01:03-B1*104:01L
FYYLGTGPEAGLPYG

SEQ ID NO: 25437 - protein, 13 aa, Severe acute respiratory syndrome coronavirus 2
  REGION 1..13: note = Table B: HLA-DPA1*01:03-B1*104:01L
WLTYTGAIKLDDK

SEQ ID NO: 25438 - protein, 16 aa, Severe acute respiratory syndrome coronavirus 2
  REGION 1..16: note = Table B: HLA-DPA1*01:03-B1*104:01L HLA-DRB1*07:01L
FSKQLQQSMSSADSTQ

SEQ ID NO: 25439 - protein, 13 aa, Severe acute respiratory syndrome coronavirus 2
  REGION 1..13: note = Table B: HLA-DQA1*05:05-B1*03:01L
LKDGTCGLVEVEK

SEQ ID NO: 25440 - protein, 12 aa, Severe acute respiratory syndrome coronavirus 2
  REGION 1..12: note = Table B: HLA-DQA1*05:05-B1*03:01L
VEVEKGVLPQLE

SEQ ID NO: 25441 - protein, 13 aa, Severe acute respiratory syndrome coronavirus 2
  REGION 1..13: note = Table B: HLA-DQA1*05:05-B1*03:01L
EVEKGVLPQLEQP

SEQ ID NO: 25442 - protein, 14 aa, Severe acute respiratory syndrome coronavirus 2
  REGION 1..14: note = Table B: HLA-DQA1*05:05-B1*03:01L
AGGHSYGADLKSFD

SEQ ID NO: 25443 - protein, 16 aa, Severe acute respiratory syndrome coronavirus 2
  REGION 1..16: note = Table B: HLA-DQA1*05:05-B1*03:01L
TENLTKEGATTCGYLP

SEQ ID NO: 25444 - protein, 14 aa, Severe acute respiratory syndrome coronavirus 2
  REGION 1..14: note = Table B: HLA-DQA1*05:05-B1*03:01L HLA-DQA1*01:03-B1*06:01L
LTKEGATTCGYLPQ

SEQ ID NO: 25445 - protein, 14 aa, Severe acute respiratory syndrome coronavirus 2
  REGION 1..14: note = Table B: HLA-DQA1*05:05-B1*03:01L
LNEEIAIILASFSA

SEQ ID NO: 25446 - protein, 12 aa, Severe acute respiratory syndrome coronavirus 2
  REGION 1..12: note = Table B: HLA-DQA1*05:05-B1*03:01L
ASEAARVVRSIF

SEQ ID NO: 25447 - protein, 12 aa, Severe acute respiratory syndrome coronavirus 2
  REGION 1..12: note = Table B: HLA-DQA1*05:05-B1*03:01L
SEAARVVRSIFS

SEQ ID NO: 25448 - protein, 11 aa, Severe acute respiratory syndrome coronavirus 2
  REGION 1..11: note = Table B: HLA-DQA1*05:05-B1*03:01L
AYITGGVVQLT

SEQ ID NO: 25449 - protein, 12 aa, Severe acute respiratory syndrome coronavirus 2
  REGION 1..12: note = Table B: HLA-DQA1*05:05-B1*03:01L
EAPLVGTPVCIN

SEQ ID NO: 25450 - protein, 13 aa, Severe acute respiratory syndrome coronavirus 2
  REGION 1..13: note = Table B: HLA-DQA1*05:05-B1*03:01L
ALAPNMMVTNNTF

SEQ ID NO: 25451 - protein, 16 aa, Severe acute respiratory syndrome coronavirus 2
  REGION 1..16: note = Table B: HLA-DQA1*05:05-B1*03:01L
DKVLNEKCSAYTVELG

SEQ ID NO: 25452 - protein, 12 aa, Severe acute respiratory syndrome coronavirus 2
  REGION 1..12: note = Table B: HLA-DQA1*05:05-B1*03:01L
YTVELGTEVNEF

SEQ ID NO: 25453 - protein, 17 aa, Severe acute respiratory syndrome coronavirus 2
  REGION 1..17: note = Table B: HLA-DQA1*05:05-B1*03:01L
DLDEWSMATYYLFDESG

SEQ ID NO: 25454 - protein, 14 aa, Severe acute respiratory syndrome coronavirus 2
  REGION 1..14: note = Table B: HLA-DQA1*05:05-B1*03:01L
EFEPSTQYEYGTED

SEQ ID NO: 25455 - protein, 11 aa, Severe acute respiratory syndrome coronavirus 2
  REGION 1..11: note = Table B: HLA-DQA1*05:05-B1*03:01L
DDYQGKPLEFG

SEQ ID NO: 25456 - protein, 16 aa, Severe acute respiratory syndrome coronavirus 2
  REGION 1..16: note = Table B: HLA-DQA1*05:05-B1*03:01L HLA-DQA1*01:03-B1*06:01L HLA-DQA1*02:01-B1*03:03L
VGQQDGSEDNQTTTIQ

SEQ ID NO: 25457 - protein, 12 aa, Severe acute respiratory syndrome coronavirus 2
  REGION 1..12: note = Table B: HLA-DQA1*05:05-B1*03:01L
TNNAMQVESDDY

SEQ ID NO: 25458 - protein, 13 aa, Severe acute respiratory syndrome coronavirus 2
  REGION 1..13: note = Table B: HLA-DQA1*05:05-B1*03:01L
FNQHEVLLAPLLS

SEQ ID NO: 25459 - protein, 14 aa, Severe acute respiratory syndrome coronavirus 2
  REGION 1..14: note = Table B: HLA-DQA1*05:05-B1*03:01L HLA-DQA1*01:03-B1*06:01L
VVQEGVLTAVVIPT

SEQ ID NO: 25460 - protein, 11 aa, Severe acute respiratory syndrome coronavirus 2
  REGION 1..11: note = Table B: HLA-DQA1*05:05-B1*03:01L
GTTEMLAKALR

SEQ ID NO: 25461 - protein, 12 aa, Severe acute respiratory syndrome coronavirus 2
  REGION 1..12: note = Table B: HLA-DQA1*05:05-B1*03:01L
YPGQGLNGYTVE

SEQ ID NO: 25462 - protein, 13 aa, Severe acute respiratory syndrome coronavirus 2
  REGION 1..13: note = Table B: HLA-DQA1*05:05-B1*03:01L
TSKTTVASLINTL

SEQ ID NO: 25463 - protein, 15 aa, Severe acute respiratory syndrome coronavirus 2
  REGION 1..15: note = Table B: HLA-DQA1*05:05-B1*03:01L
DVTKIKPHNSHEGKT

SEQ ID NO: 25464 - protein, 17 aa, Severe acute respiratory syndrome coronavirus 2
  REGION 1..17: note = Table B: HLA-DQA1*05:05-B1*03:01L
IKPHNSHEGKTFYVLPN

SEQ ID NO: 25465 - protein, 15 aa, Severe acute respiratory syndrome coronavirus 2
  REGION 1..15: note = Table B: HLA-DQA1*05:05-B1*03:01L
TSIKWADNNCYLATA

SEQ ID NO: 25466 - protein, 13 aa, Severe acute respiratory syndrome coronavirus 2
  REGION 1..13: note = Table B: HLA-DQA1*05:05-B1*03:01L
AVMYMGTLSYEQF

SEQ ID NO: 25467 - protein, 15 aa, Severe acute respiratory syndrome coronavirus 2
  REGION 1..15: note = Table B: HLA-DQA1*05:05-B1*03:01L
LVQQESPFVMMSAPP

SEQ ID NO: 25468 - protein, 12 aa, Severe acute respiratory syndrome coronavirus 2
  REGION 1..12: note = Table B: HLA-DQA1*05:05-B1*03:01L
SSEYKGPITDVF

SEQ ID NO: 25469 - protein, 12 aa, Severe acute respiratory syndrome coronavirus 2
  REGION 1..12: note = Table B: HLA-DQA1*05:05-B1*03:01L
VPNQPYPNASFD

SEQ ID NO: 25470 - protein, 17 aa, Severe acute respiratory syndrome coronavirus 2
  REGION 1..17: note = Table B: HLA-DQA1*05:05-B1*03:01L
NPTIQKDVLECNVKTTE

SEQ ID NO: 25471 - protein, 16 aa, Severe acute respiratory syndrome coronavirus 2
  REGION 1..16: note = Table B: HLA-DQA1*05:05-B1*03:01L
IQKDVLECNVKTTEVV

SEQ ID NO: 25472 - protein, 13 aa, Severe acute respiratory syndrome coronavirus 2
  REGION 1..13: note = Table B: HLA-DQA1*05:05-B1*03:01L
PANNSLKITEEVG

SEQ ID NO: 25473 - protein, 14 aa, Severe acute respiratory syndrome coronavirus 2
  REGION 1..14: note = Table B: HLA-DQA1*05:05-B1*03:01L
SLKITEEVGHTDLM

SEQ ID NO: 25474 - protein, 14 aa, Severe acute respiratory syndrome coronavirus 2
  REGION 1..14: note = Table B: HLA-DQA1*05:05-B1*03:01L
ITEEVGHTDLMAAY

SEQ ID NO: 25475 - protein, 12 aa, Severe acute respiratory syndrome coronavirus 2
  REGION 1..12: note = Table B: HLA-DQA1*05:05-B1*03:01L
KTLATHGLAAVN

SEQ ID NO: 25476 - protein, 12 aa, Severe acute respiratory syndrome coronavirus 2
  REGION 1..12: note = Table B: HLA-DQA1*05:05-B1*03:01L HLA-DRB1*14:17L
GLAAVNSVPWDT

SEQ ID NO: 25477 - protein, 13 aa, Severe acute respiratory syndrome coronavirus 2
  REGION 1..13: note = Table B: HLA-DQA1*05:05-B1*03:01L
SNLGMPSYCTGYR

SEQ ID NO: 25478 - protein, 14 aa, Severe acute respiratory syndrome coronavirus 2
  REGION 1..14: note = Table B: HLA-DQA1*05:05-B1*03:01L
TGSIPCSVCLSGLD

SEQ ID NO: 25479 - protein, 14 aa, Severe acute respiratory syndrome coronavirus 2
  REGION 1..14: note = Table B: HLA-DQA1*05:05-B1*03:01L
GSIPCSVCLSGLDS

SEQ ID NO: 25480 - protein, 14 aa, Severe acute respiratory syndrome coronavirus 2
  REGION 1..14: note = Table B: HLA-DQA1*05:05-B1*03:01L
SLDTYPSLETIQIT

SEQ ID NO: 25481 - protein, 14 aa, Severe acute respiratory syndrome coronavirus 2
  REGION 1..14: note = Table B: HLA-DQA1*05:05-B1*03:01L
DTYPSLETIQITIS

SEQ ID NO: 25482 - protein, 15 aa, Severe acute respiratory syndrome coronavirus 2
  REGION 1..15: note = Table B: HLA-DQA1*05:05-B1*03:01L
SSFKWDLTAFGLVAE

SEQ ID NO: 25483 - protein, 13 aa, Severe acute respiratory syndrome coronavirus 2
  REGION 1..13: note = Table B: HLA-DQA1*05:05-B1*03:01L
VTVKNGSIHLYFD

SEQ ID NO: 25484 - protein, 12 aa, Severe acute respiratory syndrome coronavirus 2
  REGION 1..12: note = Table B: HLA-DQA1*05:05-B1*03:01L
NTKGSLPINVIV

SEQ ID NO: 25485 - protein, 14 aa, Severe acute respiratory syndrome coronavirus 2
  REGION 1..14: note = Table B: HLA-DQA1*05:05-B1*03:01L
TKGSLPINVIVFDG

SEQ ID NO: 25486 - protein, 11 aa, Severe acute respiratory syndrome coronavirus 2
  REGION 1..11: note = Table B: HLA-DQA1*05:05-B1*03:01L
AKSASVYYSQL

SEQ ID NO: 25487 - protein, 16 aa, Severe acute respiratory syndrome coronavirus 2
  REGION 1..16: note = Table B: HLA-DQA1*05:05-B1*03:01L
LAKNVSLDNVLSTFIS

SEQ ID NO: 25488 - protein, 12 aa, Severe acute respiratory syndrome coronavirus 2
  REGION 1..12: note = Table B: HLA-DQA1*05:05-B1*03:01L
ALKGGKIVNNWL

SEQ ID NO: 25489 - protein, 12 aa, Severe acute respiratory syndrome coronavirus 2
  REGION 1..12: note = Table B: HLA-DQA1*05:05-B1*03:01L
VGFVVPGLPGTI

SEQ ID NO: 25490 - protein, 13 aa, Severe acute respiratory syndrome coronavirus 2
  REGION 1..13: note = Table B: HLA-DQA1*05:05-B1*03:01L
VFSAVGNICYTPS

SEQ ID NO: 25491 - protein, 13 aa, Severe acute respiratory syndrome coronavirus 2
  REGION 1..13: note = Table B: HLA-DQA1*05:05-B1*03:01L HLA-DQA1*01:03-B1*06:01L HLA-DQA1*02:01-B1*03:03L
ASGKPVPYCYDTN

SEQ ID NO: 25492 - protein, 13 aa, Severe acute respiratory syndrome coronavirus 2
  REGION 1..13: note = Table B: HLA-DQA1*05:05-B1*03:01L
YDTNVLEGSVAYE

SEQ ID NO: 25493 - protein, 13 aa, Severe acute respiratory syndrome coronavirus 2
  REGION 1..13: note = Table B: HLA-DQA1*05:05-B1*03:01L
DTNVLEGSVAYES

SEQ ID NO: 25494 - protein, 12 aa, Severe acute respiratory syndrome coronavirus 2
  REGION 1..12: note = Table B: HLA-DQA1*05:05-B1*03:01L
TYLEGSVRVVTT

SEQ ID NO: 25495 - protein, 12 aa, Severe acute respiratory syndrome coronavirus 2
  REGION 1..12: note = Table B: HLA-DQA1*05:05-B1*03:01L
ASIVAGGIVAIV

SEQ ID NO: 25496 - protein, 12 aa, Severe acute respiratory syndrome coronavirus 2
  REGION 1..12: note = Table B: HLA-DQA1*05:05-B1*03:01L
SIVAGGIVAIVV

SEQ ID NO: 25497 - protein, 15 aa, Severe acute respiratory syndrome coronavirus 2
  REGION 1..15: note = Table B: HLA-DQA1*05:05-B1*03:01L
FTVLCLTPVYSFLPG

SEQ ID NO: 25498 - protein, 13 aa, Severe acute respiratory syndrome coronavirus 2
  REGION 1..13: note = Table B: HLA-DQA1*05:05-B1*03:01L HLA-DRB1*04:08L
ITIAYIICISTKH

SEQ ID NO: 25499 - protein, 13 aa, Severe acute respiratory syndrome coronavirus 2
  REGION 1..13: note = Table B: HLA-DQA1*05:05-B1*03:01L
LRSDVLLPLTQYN

SEQ ID NO: 25500 - protein, 16 aa, Severe acute respiratory syndrome coronavirus 2
  REGION 1..16: note = Table B: HLA-DQA1*05:05-B1*03:01L
LPLTQYNRYLALYNKY

SEQ ID NO: 25501 - protein, 12 aa, Severe acute respiratory syndrome coronavirus 2
  REGION 1..12: note = Table B: HLA-DQA1*05:05-B1*03:01L
DVLYQPPQTSIT

SEQ ID NO: 25502 - protein, 12 aa, Severe acute respiratory syndrome coronavirus 2
  REGION 1..12: note = Table B: HLA-DQA1*05:05-B1*03:01L
VLYQPPQTSITS

SEQ ID NO: 25503 - protein, 13 aa, Severe acute respiratory syndrome coronavirus 2
  REGION 1..13: note = Table B: HLA-DQA1*05:05-B1*03:01L
GKVEGCMVQVTCG

SEQ ID NO: 25504 - protein, 12 aa, Severe acute respiratory syndrome coronavirus 2
  REGION 1..12: note = Table B: HLA-DQA1*05:05-B1*03:01L
VQAGNVQLRVIG

SEQ ID NO: 25505 - protein, 14 aa, Severe acute respiratory syndrome coronavirus 2
  REGION 1..14: note = Table B: HLA-DQA1*05:05-B1*03:01L
IQPGQTFSVLACYN

SEQ ID NO: 25506 - protein, 13 aa, Severe acute respiratory syndrome coronavirus 2
  REGION 1..13: note = Table B: HLA-DQA1*05:05-B1*03:01L
VLACYNGSPSGVY

SEQ ID NO: 25507 - protein, 15 aa, Severe acute respiratory syndrome coronavirus 2
  REGION 1..15: note = Table B: HLA-DQA1*05:05-B1*03:01L
AGTDLEGNFYGPFVD

SEQ ID NO: 25508 - protein, 13 aa, Severe acute respiratory syndrome coronavirus 2
  REGION 1..13: note = Table B: HLA-DQA1*05:05-B1*03:01L HLA-DQA1*02:01-B1*03:03L
LLQNGMNGRTILG

SEQ ID NO: 25509 - protein, 14 aa, Severe acute respiratory syndrome coronavirus 2
  REGION 1..14: note = Table B: HLA-DQA1*05:05-B1*03:01L HLA-DQA1*02:01-B1*03:03L
LQNGMNGRTILGSA

SEQ ID NO: 25510 - protein, 13 aa, Severe acute respiratory syndrome coronavirus 2
  REGION 1..13: note = Table B: HLA-DQA1*05:05-B1*03:01L HLA-DQA1*01:03-B1*06:01L
ILTSLLVLVQSTQ

SEQ ID NO: 25511 - protein, 13 aa, Severe acute respiratory syndrome coronavirus 2
  REGION 1..13: note = Table B: HLA-DQA1*05:05-B1*03:01L
FLYENAFLPFAMG

SEQ ID NO: 25512 - protein, 14 aa, Severe acute respiratory syndrome coronavirus 2
  REGION 1..14: note = Table B: HLA-DQA1*05:05-B1*03:01L
LPSLATVAYFNMVY

SEQ ID NO: 25513 - protein, 11 aa, Severe acute respiratory syndrome coronavirus 2
  REGION 1..11: note = Table B: HLA-DQA1*05:05-B1*03:01L
ILMTARTVYDD

SEQ ID NO: 25514 - protein, 12 aa, Severe acute respiratory syndrome coronavirus 2
  REGION 1..12: note = Table B: HLA-DQA1*05:05-B1*03:01L
FFITGNTLQCIM

SEQ ID NO: 25515 - protein, 13 aa, Severe acute respiratory syndrome coronavirus 2
  REGION 1..13: note = Table B: HLA-DQA1*05:05-B1*03:01L
VLQQLRVESSSKL

SEQ ID NO: 25516 - protein, 13 aa, Severe acute respiratory syndrome coronavirus 2
  REGION 1..13: note = Table B: HLA-DQA1*05:05-B1*03:01L
VESSSKLWAQCVQ

SEQ ID NO: 25517 - protein, 14 aa, Severe acute respiratory syndrome coronavirus 2
  REGION 1..14: note = Table B: HLA-DQA1*05:05-B1*03:01L HLA-DRB1*15:03L
TLQAIASEFSSLPS

SEQ ID NO: 25518 - protein, 14 aa, Severe acute respiratory syndrome coronavirus 2
  REGION 1..14: note = Table B: HLA-DQA1*05:05-B1*03:01L HLA-DRB1*15:03L
QAIASEFSSLPSYA

SEQ ID NO: 25519 - protein, 13 aa, Severe acute respiratory syndrome coronavirus 2
  REGION 1..13: note = Table B: HLA-DQA1*05:05-B1*03:01L
AKVTSAMQTMLFT

SEQ ID NO: 25520 - protein, 14 aa, Severe acute respiratory syndrome coronavirus 2
  REGION 1..14: note = Table B: HLA-DQA1*05:05-B1*03:01L
TYASALWEIQQVVD

SEQ ID NO: 25521 - protein, 14 aa, Severe acute respiratory syndrome coronavirus 2
  REGION 1..14: note = Table B: HLA-DQA1*05:05-B1*03:01L
FPKSDGTGTIYTEL

SEQ ID NO: 25522 - protein, 13 aa, Severe acute respiratory syndrome coronavirus 2
  REGION 1..13: note = Table B: HLA-DQA1*05:05-B1*03:01L
ATEVPANSTVLSF

SEQ ID NO: 25523 - protein, 14 aa, Severe acute respiratory syndrome coronavirus 2
  REGION 1..14: note = Table B: HLA-DQA1*05:05-B1*03:01L
TEVPANSTVLSFCA

SEQ ID NO: 25524 - protein, 12 aa, Severe acute respiratory syndrome coronavirus 2
  REGION 1..12: note = Table B: HLA-DQA1*05:05-B1*03:01L
THTGTGQAITVT

SEQ ID NO: 25525 - protein, 12 aa, Severe acute respiratory syndrome coronavirus 2
  REGION 1..12: note = Table B: HLA-DQA1*05:05-B1*03:01L
DQESFGGASCCL

SEQ ID NO: 25526 - protein, 14 aa, Severe acute respiratory syndrome coronavirus 2
  REGION 1..14: note = Table B: HLA-DQA1*05:05-B1*03:01L
QESFGGASCCLYCR

SEQ ID NO: 25527 - protein, 14 aa, Severe acute respiratory syndrome coronavirus 2
  REGION 1..14: note = Table B: HLA-DQA1*05:05-B1*03:01L
NTVCTVCGMWKGYG

SEQ ID NO: 25528 - protein, 12 aa, Severe acute respiratory syndrome coronavirus 2
  REGION 1..12: note = Table B: HLA-DQA1*05:05-B1*03:01L HLA-DRB1*04:08L
NYQHEETIYNLL

SEQ ID NO: 25529 - protein, 14 aa, Severe acute respiratory syndrome coronavirus 2
  REGION 1..14: note = Table B: HLA-DQA1*05:05-B1*03:01L
VENPDILRVYANLG

SEQ ID NO: 25530 - protein, 12 aa, Severe acute respiratory syndrome coronavirus 2
  REGION 1..12: note = Table B: HLA-DQA1*05:05-B1*03:01L
AMRNAGIVGVLT

SEQ ID NO: 25531 - protein, 14 aa, Severe acute respiratory syndrome coronavirus 2
  REGION 1..14: note = Table B: HLA-DQA1*05:05-B1*03:01L
MRNAGIVGVLTLDN

SEQ ID NO: 25532 - protein, 15 aa, Severe acute respiratory syndrome coronavirus 2
  REGION 1..15: note = Table B: HLA-DQA1*05:05-B1*03:01L
WDQTYHPNCVNCLDD

SEQ ID NO: 25533 - protein, 13 aa, Severe acute respiratory syndrome coronavirus 2
  REGION 1..13: note = Table B: HLA-DQA1*05:05-B1*03:01L
VLFSTVFPPTSFG

SEQ ID NO: 25534 - protein, 14 aa, Severe acute respiratory syndrome coronavirus 2
  REGION 1..14: note = Table B: HLA-DQA1*05:05-B1*03:01L
DVNLHSSRLSFKEL

SEQ ID NO: 25535 - protein, 13 aa, Severe acute respiratory syndrome coronavirus 2
  REGION 1..13: note = Table B: HLA-DQA1*05:05-B1*03:01L
FFKEGSSVELKHF

SEQ ID NO: 25536 - protein, 13 aa, Severe acute respiratory syndrome coronavirus 2
  REGION 1..13: note = Table B: HLA-DQA1*05:05-B1*03:01L
LDKSAGFPFNKWG

SEQ ID NO: 25537 - protein, 15 aa, Severe acute respiratory syndrome coronavirus 2
  REGION 1..15: note = Table B: HLA-DQA1*05:05-B1*03:01L
DSMSYEDQDALFAYT

SEQ ID NO: 25538 - protein, 11 aa, Severe acute respiratory syndrome coronavirus 2
  REGION 1..11: note = Table B: HLA-DQA1*05:05-B1*03:01L HLA-DQA1*01:03-B1*06:01L
STMTNRQFHQK

SEQ ID NO: 25539 - protein, 11 aa, Severe acute respiratory syndrome coronavirus 2
  REGION 1..11: note = Table B: HLA-DQA1*05:05-B1*03:01L
SIAATRGATVV

SEQ ID NO: 25540 - protein, 13 aa, Severe acute respiratory syndrome coronavirus 2
  REGION 1..13: note = Table B: HLA-DQA1*05:05-B1*03:01L
LYVKPGGTSSGDA

SEQ ID NO: 25541 - protein, 14 aa, Severe acute respiratory syndrome coronavirus 2
  REGION 1..14: note = Table B: HLA-DQA1*05:05-B1*03:01L
LSDDAVVCFNSTYA

SEQ ID NO: 25542 - protein, 12 aa, Severe acute respiratory syndrome coronavirus 2
  REGION 1..12: note = Table B: HLA-DQA1*05:05-B1*03:01L
QHTMLVKQGDDY

SEQ ID NO: 25543 - protein, 12 aa, Severe acute respiratory syndrome coronavirus 2
  REGION 1..12: note = Table B: HLA-DQA1*05:05-B1*03:01L
TDGTLMIERFVS

SEQ ID NO: 25544 - protein, 14 aa, Severe acute respiratory syndrome coronavirus 2
  REGION 1..14: note = Table B: HLA-DQA1*05:05-B1*03:01L HLA-DQA1*01:03-B1*06:01L HLA-DQA1*02:01-B1*03:03L
ERFVSLAIDAYPLT

SEQ ID NO: 25545 - protein, 13 aa, Severe acute respiratory syndrome coronavirus 2
  REGION 1..13: note = Table B: HLA-DQA1*05:05-B1*03:01L
QAVGACVLCNSQT

SEQ ID NO: 25546 - protein, 13 aa, Severe acute respiratory syndrome coronavirus 2
  REGION 1..13: note = Table B: HLA-DQA1*05:05-B1*03:01L
AVGACVLCNSQTS

SEQ ID NO: 25547 - protein, 14 aa, Severe acute respiratory syndrome coronavirus 2
  REGION 1..14: note = Table B: HLA-DQA1*05:05-B1*03:01L
NPYVCNAPGCDVTD

SEQ ID NO: 25548 - protein, 13 aa, Severe acute respiratory syndrome coronavirus 2
  REGION 1..13: note = Table B: HLA-DQA1*05:05-B1*03:01L
DVTDVTQLYLGGM

SEQ ID NO: 25549 - protein, 16 aa, Severe acute respiratory syndrome coronavirus 2
  REGION 1..16: note = Table B: HLA-DQA1*05:05-B1*03:01L
LYLGGMSYYCKSHKPP

SEQ ID NO: 25550 - protein, 14 aa, Severe acute respiratory syndrome coronavirus 2
  REGION 1..14: note = Table B: HLA-DQA1*05:05-B1*03:01L HLA-DQA1*01:03-B1*06:01L
NVTDFNAIATCDWT

SEQ ID NO: 25551 - protein, 11 aa, Severe acute respiratory syndrome coronavirus 2
  REGION 1..11: note = Table B: HLA-DQA1*05:05-B1*03:01L
SWEVGKPRPPL

SEQ ID NO: 25552 - protein, 14 aa, Severe acute respiratory syndrome coronavirus 2
  REGION 1..14: note = Table B: HLA-DQA1*05:05-B1*03:01L
PETTADIVVFDEIS

SEQ ID NO: 25553 - protein, 18 aa, Severe acute respiratory syndrome coronavirus 2
  REGION 1..18: note = Table B: HLA-DQA1*05:05-B1*03:01L
LEPEYFNSVCRLMKTIGP

SEQ ID NO: 25554 - protein, 12 aa, Severe acute respiratory syndrome coronavirus 2
  REGION 1..12: note = Table B: HLA-DQA1*05:05-B1*03:01L
YNSQNAVASKIL

SEQ ID NO: 25555 - protein, 15 aa, Severe acute respiratory syndrome coronavirus 2
  REGION 1..15: note = Table B: HLA-DQA1*05:05-B1*03:01L HLA-DRB1*10:01L
YRRLISMMGFKMNYQ

SEQ ID NO: 25556 - protein, 14 aa, Severe acute respiratory syndrome coronavirus 2
  REGION 1..14: note = Table B: HLA-DQA1*05:05-B1*03:01L
VGTNLPLQLGFSTG

SEQ ID NO: 25557 - protein, 19 aa, Severe acute respiratory syndrome coronavirus 2
  REGION 1..19: note = Table B: HLA-DQA1*05:05-B1*03:01L
PPGDQFKHLIPLMYKGLPW

SEQ ID NO: 25558 - protein, 12 aa, Severe acute respiratory syndrome coronavirus 2
  REGION 1..12: note = Table B: HLA-DQA1*05:05-B1*03:01L
WAHGFELTSMKY

SEQ ID NO: 25559 - protein, 15 aa, Severe acute respiratory syndrome coronavirus 2
  REGION 1..15: note = Table B: HLA-DQA1*05:05-B1*03:01L
GNLQSNHDLYCQVHG

SEQ ID NO: 25560 - protein, 15 aa, Severe acute respiratory syndrome coronavirus 2
  REGION 1..15: note = Table B: HLA-DQA1*05:05-B1*03:01L
AALLADKFPVLHDIG

SEQ ID NO: 25561 - protein, 14 aa, Severe acute respiratory syndrome coronavirus 2
  REGION 1..14: note = Table B: HLA-DQA1*05:05-B1*03:01L
VDRYPANSIVCRFD

SEQ ID NO: 25562 - protein, 14 aa, Severe acute respiratory syndrome coronavirus 2
  REGION 1..14: note = Table B: HLA-DQA1*05:05-B1*03:01L
YVPLKSATCITRCN

SEQ ID NO: 25563 - protein, 12 aa, Severe acute respiratory syndrome coronavirus 2
  REGION 1..12: note = Table B: HLA-DQA1*05:05-B1*03:01L
FTRLQSLENVAF

SEQ ID NO: 25564 - protein, 12 aa, Severe acute respiratory syndrome coronavirus 2
  REGION 1..12: note = Table B: HLA-DQA1*05:05-B1*03:01L
NKTTLPVNVAFE

SEQ ID NO: 25565 - protein, 13 aa, Severe acute respiratory syndrome coronavirus 2
  REGION 1..13: note = Table B: HLA-DQA1*05:05-B1*03:01L HLA-DQA1*01:03-B1*06:01L
KPTETICAPLTVF

SEQ ID NO: 25566 - protein, 15 aa, Severe acute respiratory syndrome coronavirus 2
  REGION 1..15: note = Table B: HLA-DQA1*05:05-B1*03:01L
FRNARNGVLITEGSV

SEQ ID NO: 25567 - protein, 15 aa, Severe acute respiratory syndrome coronavirus 2
  REGION 1..15: note = Table B: HLA-DQA1*05:05-B1*03:01L
GHVETFYPKLQSSQA

SEQ ID NO: 25568 - protein, 14 aa, Severe acute respiratory syndrome coronavirus 2
  REGION 1..14: note = Table B: HLA-DQA1*05:05-B1*03:01L
MLLEKCDLQNYGDS

SEQ ID NO: 25569 - protein, 16 aa, Severe acute respiratory syndrome coronavirus 2
  REGION 1..16: note = Table B: HLA-DQA1*05:05-B1*03:01L
VDSDLNDFVSDADSTL

SEQ ID NO: 25570 - protein, 16 aa, Severe acute respiratory syndrome coronavirus 2
  REGION 1..16: note = Table B: HLA-DQA1*05:05-B1*03:01L
TEHSWNADLYKLMGHF

SEQ ID NO: 25571 - protein, 16 aa, Severe acute respiratory syndrome coronavirus 2
  REGION 1..16: note = Table B: HLA-DQA1*05:05-B1*03:01L
EHSWNADLYKLMGHFA

SEQ ID NO: 25572 - protein, 12 aa, Severe acute respiratory syndrome coronavirus 2
  REGION 1..12: note = Table B: HLA-DQA1*05:05-B1*03:01L
VMSLKEGQINDM

SEQ ID NO: 25573 - protein, 13 aa, Severe acute respiratory syndrome coronavirus 2
  REGION 1..13: note = Table B: HLA-DQA1*05:05-B1*03:01L
VSSQCVNLTTRTQ

SEQ ID NO: 25574 - protein, 12 aa, Severe acute respiratory syndrome coronavirus 2
  REGION 1..12: note = Table B: HLA-DQA1*05:05-B1*03:01L
RSSVLHSTQDLF

SEQ ID NO: 25575 - protein, 13 aa, Severe acute respiratory syndrome coronavirus 2
  REGION 1..13: note = Table B: HLA-DQA1*05:05-B1*03:01L
NIIRGWIFGTTLD

SEQ ID NO: 25576 - protein, 15 aa, Severe acute respiratory syndrome coronavirus 2
  REGION 1..15: note = Table B: HLA-DQA1*05:05-B1*03:01L
SQPFLMDLEGKQGNF

SEQ ID NO: 25577 - protein, 13 aa, Severe acute respiratory syndrome coronavirus 2
  REGION 1..13: note = Table B: HLA-DQA1*05:05-B1*03:01L
SYLTPGDSSSGWT

SEQ ID NO: 25578 - protein, 14 aa, Severe acute respiratory syndrome coronavirus 2
  REGION 1..14: note = Table B: HLA-DQA1*05:05-B1*03:01L
YLTPGDSSSGWTAG

SEQ ID NO: 25579 - protein, 13 aa, Severe acute respiratory syndrome coronavirus 2
  REGION 1..13: note = Table B: HLA-DQA1*05:05-B1*03:01L
AGSTPCNGVEGFN

SEQ ID NO: 25580 - protein, 12 aa, Severe acute respiratory syndrome coronavirus 2
  REGION 1..12: note = Table B: HLA-DQA1*05:05-B1*03:01L
LSFELLHAPATV

SEQ ID NO: 25581 - protein, 14 aa, Severe acute respiratory syndrome coronavirus 2
  REGION 1..14: note = Table B: HLA-DQA1*05:05-B1*03:01L
SFELLHAPATVCGP

SEQ ID NO: 25582 - protein, 13 aa, Severe acute respiratory syndrome coronavirus 2
  REGION 1..13: note = Table B: HLA-DQA1*05:05-B1*03:01L
TNTSNQVAVLYQD

SEQ ID NO: 25583 - protein, 14 aa, Severe acute respiratory syndrome coronavirus 2
  REGION 1..14: note = Table B: HLA-DQA1*05:05-B1*03:01L
ADQLTPTWRVYSTG

SEQ ID NO: 25584 - protein, 12 aa, Severe acute respiratory syndrome coronavirus 2
  REGION 1..12: note = Table B: HLA-DQA1*05:05-B1*03:01L
DIPIGAGICASY

SEQ ID NO: 25585 - protein, 14 aa, Severe acute respiratory syndrome coronavirus 2
  REGION 1..14: note = Table B: HLA-DQA1*05:05-B1*03:01L
IGAGICASYQTQTN

SEQ ID NO: 25586 - protein, 13 aa, Severe acute respiratory syndrome coronavirus 2
  REGION 1..13: note = Table B: HLA-DQA1*05:05-B1*03:01L
MSLGAENSVAYSN

SEQ ID NO: 25587 - protein, 16 aa, Severe acute respiratory syndrome coronavirus 2
  REGION 1..16: note = Table B: HLA-DQA1*05:05-B1*03:01L
TKTSVDCTMYICGDST

SEQ ID NO: 25588 - protein, 14 aa, Severe acute respiratory syndrome coronavirus 2
  REGION 1..14: note = Table B: HLA-DQA1*05:05-B1*03:01L
GDSTECSNLLLQYG

SEQ ID NO: 25589 - protein, 13 aa, Severe acute respiratory syndrome coronavirus 2
  REGION 1..13: note = Table B: HLA-DQA1*05:05-B1*03:01L
LLLQYGSFCTQLN

SEQ ID NO: 25590 - protein, 13 aa, Severe acute respiratory syndrome coronavirus 2
  REGION 1..13: note = Table B: HLA-DQA1*05:05-B1*03:01L
YGSFCTQLNRALT

SEQ ID NO: 25591 - protein, 11 aa, Severe acute respiratory syndrome coronavirus 2
  REGION 1..11: note = Table B: HLA-DQA1*05:05-B1*03:01L
LLAGTITSGWT

SEQ ID NO: 25592 - protein, 14 aa, Severe acute respiratory syndrome coronavirus 2
  REGION 1..14: note = Table B: HLA-DQA1*05:05-B1*03:01L
TTDNTFVSGNCDVV

SEQ ID NO: 25593 - protein, 13 aa, Severe acute respiratory syndrome coronavirus 2
  REGION 1..13: note = Table B: HLA-DQA1*05:05-B1*03:01L HLA-DQA1*02:01-B1*03:03L
VSGNCDVVIGIVN

SEQ ID NO: 25594 - protein, 14 aa, Severe acute respiratory syndrome coronavirus 2
  REGION 1..14: note = Table B: HLA-DQA1*05:05-B1*03:01L
PDVDLGDISGINAS

SEQ ID NO: 25595 - protein, 15 aa, Severe acute respiratory syndrome coronavirus 2
  REGION 1..15: note = Table B: HLA-DQA1*05:05-B1*03:01L
DATPSDFVRATATIP

SEQ ID NO: 25596 - protein, 14 aa, Severe acute respiratory syndrome coronavirus 2
  REGION 1..14: note = Table B: HLA-DQA1*05:05-B1*03:01L HLA-DQA1*01:03-B1*06:01L HLA-DQA1*02:01-B1*03:03L
EKWESGVKDCVVLH

SEQ ID NO: 25597 - protein, 11 aa, Severe acute respiratory syndrome coronavirus 2
  REGION 1..11: note = Table B: HLA-DQA1*05:05-B1*03:01L
TDTGVEHVTFF

SEQ ID NO: 25598 - protein, 17 aa, Severe acute respiratory syndrome coronavirus 2
  REGION 1..17: note = Table B: HLA-DQA1*05:05-B1*03:01L
DTGVEHVTFFIYNKIVD

SEQ ID NO: 25599 - protein, 13 aa, Severe acute respiratory syndrome coronavirus 2
  REGION 1..13: note = Table B: HLA-DQA1*05:05-B1*03:01L
VQIHTIDGSSGVV

SEQ ID NO: 25600 - protein, 14 aa, Severe acute respiratory syndrome coronavirus 2
  REGION 1..14: note = Table B: HLA-DQA1*05:05-B1*03:01L
SFNPETNILLNVPL

SEQ ID NO: 25601 - protein, 13 aa, Severe acute respiratory syndrome coronavirus 2
  REGION 1..13: note = Table B: HLA-DQA1*05:05-B1*03:01L
NVPLHGTILTRPL

SEQ ID NO: 25602 - protein, 14 aa, Severe acute respiratory syndrome coronavirus 2
  REGION 1..14: note = Table B: HLA-DQA1*05:05-B1*03:01L
VPLHGTILTRPLLE

SEQ ID NO: 25603 - protein, 12 aa, Severe acute respiratory syndrome coronavirus 2
  REGION 1..12: note = Table B: HLA-DQA1*05:05-B1*03:01L HLA-DQA1*02:01-B1*03:03L
TLATCELYHYQE

SEQ ID NO: 25604 - protein, 14 aa, Severe acute respiratory syndrome coronavirus 2
  REGION 1..14: note = Table B: HLA-DQA1*05:05-B1*03:01L HLA-DQA1*01:03-B1*06:01L
YIRVGARKSAPLIE

SEQ ID NO: 25605 - protein, 13 aa, Severe acute respiratory syndrome coronavirus 2
  REGION 1..13: note = Table B: HLA-DQA1*05:05-B1*03:01L
PIQYIDIGNYTVS

SEQ ID NO: 25606 - protein, 14 aa, Severe acute respiratory syndrome coronavirus 2
  REGION 1..14: note = Table B: HLA-DQA1*05:05-B1*03:01L HLA-DQA1*02:01-B1*03:03L
GGPSDSTGSNQNGE

SEQ ID NO: 25607 - protein, 12 aa, Severe acute respiratory syndrome coronavirus 2
  REGION 1..12: note = Table B: HLA-DQA1*05:05-B1*03:01L HLA-DQA1*02:01-B1*03:03L
LKFPRGQGVPIN

SEQ ID NO: 25608 - protein, 10 aa, Severe acute respiratory syndrome coronavirus 2
  REGION 1..10: note = Table B: HLA-DQA1*05:05-B1*03:01L
EAGLPYGANK

SEQ ID NO: 25609 - protein, 16 aa, Severe acute respiratory syndrome coronavirus 2
  REGION 1..16: note = Table B: HLA-DQA1*05:05-B1*03:01L
LNQLESKMSGKGQQQQ

SEQ ID NO: 25610 - protein, 15 aa, Severe acute respiratory syndrome coronavirus 2
  REGION 1..15: note = Table B: HLA-DQA1*05:05-B1*03:01L
IGMEVTPSGTWLTYT

SEQ ID NO: 25611 - protein, 14 aa, Severe acute respiratory syndrome coronavirus 2
  REGION 1..14: note = Table B: HLA-DQA1*05:05-B1*03:01L
EVTPSGTWLTYTGA

SEQ ID NO: 25612 - protein, 14 aa, Severe acute respiratory syndrome coronavirus 2
  REGION 1..14: note = Table B: HLA-DQA1*05:05-B1*03:01L
VTPSGTWLTYTGAI

SEQ ID NO: 25613 - protein, 15 aa, Severe acute respiratory syndrome coronavirus 2
  REGION 1..15: note = Table B: HLA-DQA1*05:05-B1*03:01L HLA-DQA1*01:03-B1*06:01L
KQLQQSMSSADSTQA

SEQ ID NO: 25614 - protein, 12 aa, Severe acute respiratory syndrome coronavirus 2
  REGION 1..12: note = Table B: HLA-DRB1*14:17L
KGVLPQLEQPYV

SEQ ID NO: 25615 - protein, 11 aa, Severe acute respiratory syndrome coronavirus 2
  REGION 1..11: note = Table B: HLA-DRB1*14:17L HLA-DRB1*04:08L
IQYGRSGETLG

SEQ ID NO: 25616 - protein, 11 aa, Severe acute respiratory syndrome coronavirus 2
  REGION 1..11: note = Table B: HLA-DRB1*14:17L
SIFSRTLETAQ

SEQ ID NO: 25617 - protein, 13 aa, Severe acute respiratory syndrome coronavirus 2
  REGION 1..13: note = Table B: HLA-DRB1*14:17L HLA-DPA1*01:02-B1*04:01L HLA-DRB1*08:03L
GGQIVTCAKEIKE

SEQ ID NO: 25618 - protein, 12 aa, Severe acute respiratory syndrome coronavirus 2
  REGION 1..12: note = Table B: HLA-DRB1*14:17L
VVADAVIKTLQP

SEQ ID NO: 25619 - protein, 12 aa, Severe acute respiratory syndrome coronavirus 2
  REGION 1..12: note = Table B: HLA-DRB1*14:17L
SGYLKLTDNVYI

SEQ ID NO: 25620 - protein, 12 aa, Severe acute respiratory syndrome coronavirus 2
  REGION 1..12: note = Table B: HLA-DRB1*14:17L
GADVTKIKPHNS

SEQ ID NO: 25621 - protein, 11 aa, Severe acute respiratory syndrome coronavirus 2
  REGION 1..11: note = Table B: HLA-DRB1*14:17L
IKFADDLNQLT

SEQ ID NO: 25622 - protein, 11 aa, Severe acute respiratory syndrome coronavirus 2
  REGION 1..11: note = Table B: HLA-DRB1*14:17L
LTGYKKPASRE

SEQ ID NO: 25623 - protein, 13 aa, Severe acute respiratory syndrome coronavirus 2
  REGION 1..13: note = Table B: HLA-DRB1*14:17L HLA-DRB1*16:01L
TTEVVGDIILKPA

SEQ ID NO: 25624 - protein, 12 aa, Severe acute respiratory syndrome coronavirus 2
  REGION 1..12: note = Table B: HLA-DRB1*14:17L
NNSLKITEEVGH

SEQ ID NO: 25625 - protein, 12 aa, Severe acute respiratory syndrome coronavirus 2
  REGION 1..12: note = Table B: HLA-DRB1*14:17L
SSAKSASVYYSQ

SEQ ID NO: 25626 - protein, 13 aa, Severe acute respiratory syndrome coronavirus 2
  REGION 1..13: note = Table B: HLA-DRB1*14:17L
LDQALVSDVGDSA

SEQ ID NO: 25627 - protein, 12 aa, Severe acute respiratory syndrome coronavirus 2
  REGION 1..12: note = Table B: HLA-DRB1*14:17L
ALVSDVGDSAEV

SEQ ID NO: 25628 - protein, 13 aa, Severe acute respiratory syndrome coronavirus 2
  REGION 1..13: note = Table B: HLA-DRB1*14:17L
TRDIASTDTCFAN

SEQ ID NO: 25629 - protein, 13 aa, Severe acute respiratory syndrome coronavirus 2
  REGION 1..13: note = Table B: HLA-DRB1*14:17L HLA-DRB1*16:01L
ADFDTWFSQRGGS

SEQ ID NO: 25630 - protein, 13 aa, Severe acute respiratory syndrome coronavirus 2
  REGION 1..13: note = Table B: HLA-DRB1*14:17L
IGALDISASIVAG

SEQ ID NO: 25631 - protein, 13 aa, Severe acute respiratory syndrome coronavirus 2
  REGION 1..13: note = Table B: HLA-DRB1*14:17L
GALDISASIVAGG

SEQ ID NO: 25632 - protein, 11 aa, Severe acute respiratory syndrome coronavirus 2
  REGION 1..11: note = Table B: HLA-DRB1*14:17L
DVLLPLTQYNR

SEQ ID NO: 25633 - protein, 12 aa, Severe acute respiratory syndrome coronavirus 2
  REGION 1..12: note = Table B: HLA-DRB1*14:17L
HVDILGPLSAQT

SEQ ID NO: 25634 - protein, 11 aa, Severe acute respiratory syndrome coronavirus 2
  REGION 1..11: note = Table B: HLA-DRB1*14:17L
IKVATVQSKMS

SEQ ID NO: 25635 - protein, 11 aa, Severe acute respiratory syndrome coronavirus 2
  REGION 1..11: note = Table B: HLA-DRB1*14:17L
ELSPVALRQMS

SEQ ID NO: 25636 - protein, 12 aa, Severe acute respiratory syndrome coronavirus 2
  REGION 1..12: note = Table B: HLA-DRB1*14:17L
ATEVPANSTVLS

SEQ ID NO: 25637 - protein, 13 aa, Severe acute respiratory syndrome coronavirus 2
  REGION 1..13: note = Table B: HLA-DRB1*14:17L HLA-DRB1*04:08L
AAKAYKDYLASGG

SEQ ID NO: 25638 - protein, 10 aa, Severe acute respiratory syndrome coronavirus 2
  REGION 1..10: note = Table B: HLA-DRB1*14:17L
LRVYANLGER

SEQ ID NO: 25639 - protein, 11 aa, Severe acute respiratory syndrome coronavirus 2
  REGION 1..11: note = Table B: HLA-DRB1*14:17L
ANVNALLSTDG

SEQ ID NO: 25640 - protein, 10 aa, Severe acute respiratory syndrome coronavirus 2
  REGION 1..10: note = Table B: HLA-DRB1*14:17L
LQGPPGTGKS

SEQ ID NO: 25641 - protein, 11 aa, Severe acute respiratory syndrome coronavirus 2
  REGION 1..11: note = Table B: HLA-DRB1*14:17L
FKVNSTLEQYV

SEQ ID NO: 25642 - protein, 13 aa, Severe acute respiratory syndrome coronavirus 2
  REGION 1..13: note = Table B: HLA-DRB1*14:17L HLA-DRB1*04:08L
NYQVNGYPNMFIT

SEQ ID NO: 25643 - protein, 11 aa, Severe acute respiratory syndrome coronavirus 2
  REGION 1..11: note = Table B: HLA-DRB1*14:17L
HAIHVSGTNGT

SEQ ID NO: 25644 - protein, 11 aa, Severe acute respiratory syndrome coronavirus 2
  REGION 1..11: note = Table B: HLA-DRB1*14:17L
TTLDSKTQSLL

SEQ ID NO: 25645 - protein, 13 aa, Severe acute respiratory syndrome coronavirus 2
  REGION 1..13: note = Table B: HLA-DRB1*14:17L
GGVSVITPGTNTS

SEQ ID NO: 25646 - protein, 15 aa, Severe acute respiratory syndrome coronavirus 2
  REGION 1..15: note = Table B: HLA-DRB1*14:17L
AGFIKQYGDCLGDIA

SEQ ID NO: 25647 - protein, 15 aa, Severe acute respiratory syndrome coronavirus 2
  REGION 1..15: note = Table B: HLA-DRB1*14:17L
LPPLLTDEMIAQYTS

SEQ ID NO: 25648 - protein, 12 aa, Severe acute respiratory syndrome coronavirus 2
  REGION 1..12: note = Table B: HLA-DRB1*14:17L
QGEIKDATPSDF

SEQ ID NO: 25649 - protein, 11 aa, Severe acute respiratory syndrome coronavirus 2
  REGION 1..11: note = Table B: HLA-DRB1*14:17L
YVYSRVKNLNS

SEQ ID NO: 25650 - protein, 11 aa, Severe acute respiratory syndrome coronavirus 2
  REGION 1..11: note = Table B: HLA-DRB1*14:17L
YSRVKNLNSSR

SEQ ID NO: 25651 - protein, 11 aa, Severe acute respiratory syndrome coronavirus 2
  REGION 1..11: note = Table B: HLA-DRB1*14:17L
YRINWITGGIA

SEQ ID NO: 25652 - protein, 11 aa, Severe acute respiratory syndrome coronavirus 2
  REGION 1..11: note = Table B: HLA-DRB1*14:17L HLA-DQA1*02:01-B1*03:03L
SELVIGAVILR

SEQ ID NO: 25653 - protein, 13 aa, Severe acute respiratory syndrome coronavirus 2
  REGION 1..13: note = Table B: HLA-DRB1*14:17L
ASQRVAGDSGFAA

SEQ ID NO: 25654 - protein, 11 aa, Severe acute respiratory syndrome coronavirus 2
  REGION 1..11: note = Table B: HLA-DRB1*14:17L
IKNLSKSLTEN

SEQ ID NO: 25655 - protein, 11 aa, Severe acute respiratory syndrome coronavirus 2
  REGION 1..11: note = Table B: HLA-DPA1*01:02-B1*04:01L HLA-DQA1*02:01-B1*03:03L HLA-DRB1*15:03L
GEIPVAYRKVL

SEQ ID NO: 25656 - protein, 12 aa, Severe acute respiratory syndrome coronavirus 2
  REGION 1..12: note = Table B: HLA-DPA1*01:02-B1*04:01L
SEVGPEHSLAEY

SEQ ID NO: 25657 - protein, 11 aa, Severe acute respiratory syndrome coronavirus 2
  REGION 1..11: note = Table B: HLA-DPA1*01:02-B1*04:01L HLA-DQA1*01:03-B1*06:01L
LNDNLLEILQK

SEQ ID NO: 25658 - protein, 10 aa, Severe acute respiratory syndrome coronavirus 2
  REGION 1..10: note = Table B: HLA-DPA1*01:02-B1*04:01L
DYKAFKQIVE

SEQ ID NO: 25659 - protein, 11 aa, Severe acute respiratory syndrome coronavirus 2
  REGION 1..11: note = Table B: HLA-DPA1*01:02-B1*04:01L
SEAARVVRSIF

SEQ ID NO: 25660 - protein, 10 aa, Severe acute respiratory syndrome coronavirus 2
  REGION 1..10: note = Table B: HLA-DPA1*01:02-B1*04:01L
FGTVYEKLKP

SEQ ID NO: 25661 - protein, 10 aa, Severe acute respiratory syndrome coronavirus 2
  REGION 1..10: note = Table B: HLA-DPA1*01:02-B1*04:01L
GTVYEKLKPV

SEQ ID NO: 25662 - protein, 10 aa, Severe acute respiratory syndrome coronavirus 2
  REGION 1..10: note = Table B: HLA-DPA1*01:02-B1*04:01L
DWLEEKFKEG

SEQ ID NO: 25663 - protein, 10 aa, Severe acute respiratory syndrome coronavirus 2
  REGION 1..10: note = Table B: HLA-DPA1*01:02-B1*04:01L
SVQTFFKLVN

SEQ ID NO: 25664 - protein, 10 aa, Severe acute respiratory syndrome coronavirus 2
  REGION 1..10: note = Table B: HLA-DPA1*01:02-B1*04:01L HLA-DRB1*16:01L HLA-DQA1*01:03-B1*06:01L HLA-DRB1*15:03L
TFFKLVNKFL

SEQ ID NO: 25665 - protein, 10 aa, Severe acute respiratory syndrome coronavirus 2
  REGION 1..10: note = Table B: HLA-DPA1*01:02-B1*04:01L HLA-DQA1*01:03-B1*06:01L
SFSGYLKLTD

SEQ ID NO: 25666 - protein, 10 aa, Severe acute respiratory syndrome coronavirus 2
  REGION 1..10: note = Table B: HLA-DPA1*01:02-B1*04:01L
RVEAFEYYHT

SEQ ID NO: 25667 - protein, 11 aa, Severe acute respiratory syndrome coronavirus 2
  REGION 1..11: note = Table B: HLA-DPA1*01:02-B1*04:01L HLA-DQA1*02:01-B1*03:03L
ETMSYLFQHAN

SEQ ID NO: 25668 - protein, 12 aa, Severe acute respiratory syndrome coronavirus 2
  REGION 1..12: note = Table B: HLA-DPA1*01:02-B1*04:01L HLA-DRB1*16:01L
TGNYQCGHYKHI

SEQ ID NO: 25669 - protein, 10 aa, Severe acute respiratory syndrome coronavirus 2
  REGION 1..10: note = Table B: HLA-DPA1*01:02-B1*04:01L
YQCGHYKHIT

SEQ ID NO: 25670 - protein, 14 aa, Severe acute respiratory syndrome coronavirus 2
  REGION 1..14: note = Table B: HLA-DPA1*01:02-B1*04:01L
TSNSFDVLKSEDAQ

SEQ ID NO: 25671 - protein, 13 aa, Severe acute respiratory syndrome coronavirus 2
  REGION 1..13: note = Table B: HLA-DPA1*01:02-B1*04:01L
TIAKNTVKSVGKF

SEQ ID NO: 25672 - protein, 10 aa, Severe acute respiratory syndrome coronavirus 2
  REGION 1..10: note = Table B: HLA-DPA1*01:02-B1*04:01L
ITISSFKWDL

SEQ ID NO: 25673 - protein, 10 aa, Severe acute respiratory syndrome coronavirus 2
  REGION 1..10: note = Table B: HLA-DPA1*01:02-B1*04:01L HLA-DRB1*16:01L
FYYVWKSYVH

SEQ ID NO: 25674 - protein, 10 aa, Severe acute respiratory syndrome coronavirus 2
  REGION 1..10: note = Table B: HLA-DPA1*01:02-B1*04:01L
VWKSYVHVVD

SEQ ID NO: 25675 - protein, 11 aa, Severe acute respiratory syndrome coronavirus 2
  REGION 1..11: note = Table B: HLA-DPA1*01:02-B1*04:01L
HINAQVAKSHN

SEQ ID NO: 25676 - protein, 11 aa, Severe acute respiratory syndrome coronavirus 2
  REGION 1..11: note = Table B: HLA-DPA1*01:02-B1*04:01L HLA-DQA1*01:03-B1*06:01L
TNGDFLHFLPR

SEQ ID NO: 25677 - protein, 10 aa, Severe acute respiratory syndrome coronavirus 2
  REGION 1..10: note = Table B: HLA-DPA1*01:02-B1*04:01L
FLPRVFSAVG

SEQ ID NO: 25678 - protein, 11 aa, Severe acute respiratory syndrome coronavirus 2
  REGION 1..11: note = Table B: HLA-DPA1*01:02-B1*04:01L
LAYYFMRFRRA

SEQ ID NO: 25679 - protein, 12 aa, Severe acute respiratory syndrome coronavirus 2
  REGION 1..12: note = Table B: HLA-DPA1*01:02-B1*04:01L
ISTKHFYWFFSN

SEQ ID NO: 25680 - protein, 11 aa, Severe acute respiratory syndrome coronavirus 2
  REGION 1..11: note = Table B: HLA-DPA1*01:02-B1*04:01L
GVSFSTFEEAA

SEQ ID NO: 25681 - protein, 10 aa, Severe acute respiratory syndrome coronavirus 2
  REGION 1..10: note = Table B: HLA-DPA1*01:02-B1*04:01L
LPLTQYNRYL

SEQ ID NO: 25682 - protein, 11 aa, Severe acute respiratory syndrome coronavirus 2
  REGION 1..11: note = Table B: HLA-DPA1*01:02-B1*04:01L
YDCVSFCYMHH

SEQ ID NO: 25683 - protein, 10 aa, Severe acute respiratory syndrome coronavirus 2
  REGION 1..10: note = Table B: HLA-DPA1*01:02-B1*04:01L
RWFLNRFTTT

SEQ ID NO: 25684 - protein, 10 aa, Severe acute respiratory syndrome coronavirus 2
  REGION 1..10: note = Table B: HLA-DPA1*01:02-B1*04:01L
RVWTLMNVLT

SEQ ID NO: 25685 - protein, 11 aa, Severe acute respiratory syndrome coronavirus 2
  REGION 1..11: note = Table B: HLA-DPA1*01:02-B1*04:01L
TLVYKVYYGNA

SEQ ID NO: 25686 - protein, 10 aa, Severe acute respiratory syndrome coronavirus 2
  REGION 1..10: note = Table B: HLA-DPA1*01:02-B1*04:01L HLA-DQA1*01:03-B1*06:01L
VSTQEFRYMN

SEQ ID NO: 25687 - protein, 16 aa, Severe acute respiratory syndrome coronavirus 2
  REGION 1..16: note = Table B: HLA-DPA1*01:02-B1*04:01L
TAQEAYEQAVANGDSE

SEQ ID NO: 25688 - protein, 10 aa, Severe acute respiratory syndrome coronavirus 2
  REGION 1..10: note = Table B: HLA-DPA1*01:02-B1*04:01L
MLFTMLRKLD

SEQ ID NO: 25689 - protein, 16 aa, Severe acute respiratory syndrome coronavirus 2
  REGION 1..16: note = Table B: HLA-DPA1*01:02-B1*04:01L
ASALWEIQQVVDADSK

SEQ ID NO: 25690 - protein, 11 aa, Severe acute respiratory syndrome coronavirus 2
  REGION 1..11: note = Table B: HLA-DPA1*01:02-B1*04:01L HLA-DRB1*07:01L HLA-DQA1*01:03-B1*06:01L
QVVDADSKIVQ

SEQ ID NO: 25691 - protein, 15 aa, Severe acute respiratory syndrome coronavirus 2
  REGION 1..15: note = Table B: HLA-DPA1*01:02-B1*04:01L
TDDNALAYYNTTKGG

SEQ ID NO: 25692 - protein, 11 aa, Severe acute respiratory syndrome coronavirus 2
  REGION 1..11: note = Table B: HLA-DPA1*01:02-B1*04:01L
DLQDLKWARFP

SEQ ID NO: 25693 - protein, 11 aa, Severe acute respiratory syndrome coronavirus 2
  REGION 1..11: note = Table B: HLA-DPA1*01:02-B1*04:01L
LQDLKWARFPK

SEQ ID NO: 25694 - protein, 10 aa, Severe acute respiratory syndrome coronavirus 2
  REGION 1..10: note = Table B: HLA-DPA1*01:02-B1*04:01L
LKWARFPKSD

SEQ ID NO: 25695 - protein, 11 aa, Severe acute respiratory syndrome coronavirus 2
  REGION 1..11: note = Table B: HLA-DPA1*01:02-B1*04:01L HLA-DQA1*01:03-B1*06:01L
NATEVPANSTV

SEQ ID NO: 25696 - protein, 11 aa, Severe acute respiratory syndrome coronavirus 2
  REGION 1..11: note = Table B: HLA-DPA1*01:02-B1*04:01L
DVVYRAFDIYN

SEQ ID NO: 25697 - protein, 11 aa, Severe acute respiratory syndrome coronavirus 2
  REGION 1..11: note = Table B: HLA-DPA1*01:02-B1*04:01L
VVYRAFDIYND

SEQ ID NO: 25698 - protein, 11 aa, Severe acute respiratory syndrome coronavirus 2
  REGION 1..11: note = Table B: HLA-DPA1*01:02-B1*04:01L
KVAGFAKFLKT

SEQ ID NO: 25699 - protein, 11 aa, Severe acute respiratory syndrome coronavirus 2
  REGION 1..11: note = Table B: HLA-DPA1*01:02-B1*04:01L
YTMADLVYALR

SEQ ID NO: 25700 - protein, 11 aa, Severe acute respiratory syndrome coronavirus 2
  REGION 1..11: note = Table B: HLA-DPA1*01:02-B1*04:01L
LKTVQFCDAMR

SEQ ID NO: 25701 - protein, 10 aa, Severe acute respiratory syndrome coronavirus 2
  REGION 1..10: note = Table B: HLA-DPA1*01:02-B1*04:01L
YHFRELGVVH

SEQ ID NO: 25702 - protein, 12 aa, Severe acute respiratory syndrome coronavirus 2
  REGION 1..12: note = Table B: HLA-DPA1*01:02-B1*04:01L HLA-DRB1*16:01L
FNKDFYDFAVSK

SEQ ID NO: 25703 - protein, 10 aa, Severe acute respiratory syndrome coronavirus 2
  REGION 1..10: note = Table B: HLA-DPA1*01:02-B1*04:01L
YDYYRYNLPT

SEQ ID NO: 25704 - protein, 10 aa, Severe acute respiratory syndrome coronavirus 2
  REGION 1..10: note = Table B: HLA-DPA1*01:02-B1*04:01L
FYGGWHNMLK

SEQ ID NO: 25705 - protein, 17 aa, Severe acute respiratory syndrome coronavirus 2
  REGION 1..17: note = Table B: HLA-DPA1*01:02-B1*04:01L
MPNMLRIMASLVLARKH

SEQ ID NO: 25706 - protein, 16 aa, Severe acute respiratory syndrome coronavirus 2
  REGION 1..16: note = Table B: HLA-DPA1*01:02-B1*04:01L HLA-DRB1*10:01L
HRFYRLANECAQVLSE

SEQ ID NO: 25707 - protein, 10 aa, Severe acute respiratory syndrome coronavirus 2
  REGION 1..10: note = Table B: HLA-DPA1*01:02-B1*04:01L
VNEFYAYLRK

SEQ ID NO: 25708 - protein, 10 aa, Severe acute respiratory syndrome coronavirus 2
  REGION 1..10: note = Table B: HLA-DPA1*01:02-B1*04:01L
NEFYAYLRKH

SEQ ID NO: 25709 - protein, 10 aa, Severe acute respiratory syndrome coronavirus 2
  REGION 1..10: note = Table B: HLA-DPA1*01:02-B1*04:01L
FKSVLYYQNN

SEQ ID NO: 25710 - protein, 15 aa, Severe acute respiratory syndrome coronavirus 2
  REGION 1..15: note = Table B: HLA-DPA1*01:02-B1*04:01L
VKQGDDYVYLPYPDP

SEQ ID NO: 25711 - protein, 10 aa, Severe acute respiratory syndrome coronavirus 2
  REGION 1..10: note = Table B: HLA-DPA1*01:02-B1*04:01L
VFHLYLQYIR

SEQ ID NO: 25712 - protein, 11 aa, Severe acute respiratory syndrome coronavirus 2
  REGION 1..11: note = Table B: HLA-DPA1*01:02-B1*04:01L
VMLTNDNTSRY

SEQ ID NO: 25713 - protein, 11 aa, Severe acute respiratory syndrome coronavirus 2
  REGION 1..11: note = Table B: HLA-DPA1*01:02-B1*04:01L
DAVVYRGTTTY

SEQ ID NO: 25714 - protein, 11 aa, Severe acute respiratory syndrome coronavirus 2
  REGION 1..11: note = Table B: HLA-DPA1*01:02-B1*04:01L
AVVYRGTTTYK

SEQ ID NO: 25715 - protein, 10 aa, Severe acute respiratory syndrome coronavirus 2
  REGION 1..10: note = Table B: HLA-DPA1*01:02-B1*04:01L
VGDYFVLTSH

SEQ ID NO: 25716 - protein, 10 aa, Severe acute respiratory syndrome coronavirus 2
  REGION 1..10: note = Table B: HLA-DPA1*01:02-B1*04:01L
LRAKHYVYIG

SEQ ID NO: 25717 - protein, 13 aa, Severe acute respiratory syndrome coronavirus 2
  REGION 1..13: note = Table B: HLA-DPA1*01:02-B1*04:01L HLA-DRB1*10:01L HLA-DRB1*08:03L
SALVYDNKLKAHK

SEQ ID NO: 25718 - protein, 10 aa, Severe acute respiratory syndrome coronavirus 2
  REGION 1..10: note = Table B: HLA-DPA1*01:02-B1*04:01L
VTGLFKDCSK

SEQ ID NO: 25719 - protein, 12 aa, Severe acute respiratory syndrome coronavirus 2
  REGION 1..12: note = Table B: HLA-DPA1*01:02-B1*04:01L HLA-DRB1*04:08L
DQFKHLIPLMYK

SEQ ID NO: 25720 - protein, 11 aa, Severe acute respiratory syndrome coronavirus 2
  REGION 1..11: note = Table B: HLA-DPA1*01:02-B1*04:01L
VQMLSDTLKNL

SEQ ID NO: 25721 - protein, 11 aa, Severe acute respiratory syndrome coronavirus 2
  REGION 1..11: note = Table B: HLA-DPA1*01:02-B1*04:01L
DRVVFVLWAHG

SEQ ID NO: 25722 - protein, 11 aa, Severe acute respiratory syndrome coronavirus 2
  REGION 1..11: note = Table B: HLA-DPA1*01:02-B1*04:01L
FELTSMKYFVK

SEQ ID NO: 25723 - protein, 11 aa, Severe acute respiratory syndrome coronavirus 2
  REGION 1..11: note = Table B: HLA-DPA1*01:02-B1*04:01L
SMKYFVKIGPE

SEQ ID NO: 25724 - protein, 17 aa, Severe acute respiratory syndrome coronavirus 2
  REGION 1..17: note = Table B: HLA-DPA1*01:02-B1*04:01L
DTRVLSNLNLPGCDGGS

SEQ ID NO: 25725 - protein, 13 aa, Severe acute respiratory syndrome coronavirus 2
  REGION 1..13: note = Table B: HLA-DPA1*01:02-B1*04:01L
SAGFSLWVYKQFD

SEQ ID NO: 25726 - protein, 10 aa, Severe acute respiratory syndrome coronavirus 2
  REGION 1..10: note = Table B: HLA-DPA1*01:02-B1*04:01L
LWNTFTRLQS

SEQ ID NO: 25727 - protein, 10 aa, Severe acute respiratory syndrome coronavirus 2
  REGION 1..10: note = Table B: HLA-DPA1*01:02-B1*04:01L
WNTFTRLQSL

SEQ ID NO: 25728 - protein, 10 aa, Severe acute respiratory syndrome coronavirus 2
  REGION 1..10: note = Table B: HLA-DPA1*01:02-B1*04:01L
VAFELWAKRN

SEQ ID NO: 25729 - protein, 10 aa, Severe acute respiratory syndrome coronavirus 2
  REGION 1..10: note = Table B: HLA-DPA1*01:02-B1*04:01L
TQFNYYKKVD

SEQ ID NO: 25730 - protein, 10 aa, Severe acute respiratory syndrome coronavirus 2
  REGION 1..10: note = Table B: HLA-DPA1*01:02-B1*04:01L
FEHIVYGDFS

SEQ ID NO: 25731 - protein, 10 aa, Severe acute respiratory syndrome coronavirus 2
  REGION 1..10: note = Table B: HLA-DPA1*01:02-B1*04:01L
RFKESPFELE

SEQ ID NO: 25732 - protein, 10 aa, Severe acute respiratory syndrome coronavirus 2
  REGION 1..10: note = Table B: HLA-DPA1*01:02-B1*04:01L
FKESPFELED

SEQ ID NO: 25733 - protein, 11 aa, Severe acute respiratory syndrome coronavirus 2
  REGION 1..11: note = Table B: HLA-DPA1*01:02-B1*04:01L
ISFMLWCKDGH

SEQ ID NO: 25734 - protein, 17 aa, Severe acute respiratory syndrome coronavirus 2
  REGION 1..17: note = Table B: HLA-DPA1*01:02-B1*04:01L
DADSTLIGDCATVHTAN

SEQ ID NO: 25735 - protein, 13 aa, Severe acute respiratory syndrome coronavirus 2
  REGION 1..13: note = Table B: HLA-DPA1*01:02-B1*04:01L
WDLIISDMYDPKT

SEQ ID NO: 25736 - protein, 11 aa, Severe acute respiratory syndrome coronavirus 2
  REGION 1..11: note = Table B: HLA-DPA1*01:02-B1*04:01L
YVMHANYIFWR

SEQ ID NO: 25737 - protein, 11 aa, Severe acute respiratory syndrome coronavirus 2
  REGION 1..11: note = Table B: HLA-DPA1*01:02-B1*04:01L
KVFRSSVLHST

SEQ ID NO: 25738 - protein, 10 aa, Severe acute respiratory syndrome coronavirus 2
  REGION 1..10: note = Table B: HLA-DPA1*01:02-B1*04:01L
SNVTWFHAIH

SEQ ID NO: 25739 - protein, 10 aa, Severe acute respiratory syndrome coronavirus 2
  REGION 1..10: note = Table B: HLA-DPA1*01:02-B1*04:01L HLA-DQA1*01:03-B1*06:01L
IIRGWIFGTT

SEQ ID NO: 25740 - protein, 12 aa, Severe acute respiratory syndrome coronavirus 2
  REGION 1..12: note = Table B: HLA-DPA1*01:02-B1*04:01L HLA-DQA1*01:03-B1*06:01L
FQFCNDPFLGVY

SEQ ID NO: 25741 - protein, 12 aa, Severe acute respiratory syndrome coronavirus 2
  REGION 1..12: note = Table B: HLA-DPA1*01:02-B1*04:01L HLA-DRB1*04:08L
FCNDPFLGVYYH

SEQ ID NO: 25742 - protein, 10 aa, Severe acute respiratory syndrome coronavirus 2
  REGION 1..10: note = Table B: HLA-DPA1*01:02-B1*04:01L
PFLGVYYHKN

SEQ ID NO: 25743 - protein, 10 aa, Severe acute respiratory syndrome coronavirus 2
  REGION 1..10: note = Table B: HLA-DPA1*01:02-B1*04:01L
FLGVYYHKNN

SEQ ID NO: 25744 - protein, 12 aa, Severe acute respiratory syndrome coronavirus 2
  REGION 1..12: note = Table B: HLA-DPA1*01:02-B1*04:01L
KNLREFVFKNID

SEQ ID NO: 25745 - protein, 10 aa, Severe acute respiratory syndrome coronavirus 2
  REGION 1..10: note = Table B: HLA-DPA1*01:02-B1*04:01L
YQTSNFRVQP

SEQ ID NO: 25746 - protein, 11 aa, Severe acute respiratory syndrome coronavirus 2
  REGION 1..11: note = Table B: HLA-DPA1*01:02-B1*04:01L
YNYLYRLFRKS

SEQ ID NO: 25747 - protein, 10 aa, Severe acute respiratory syndrome coronavirus 2
  REGION 1..10: note = Table B: HLA-DPA1*01:02-B1*04:01L HLA-DRB1*16:01L HLA-DRB1*04:08L
YLYRLFRKSN

SEQ ID NO: 25748 - protein, 17 aa, Severe acute respiratory syndrome coronavirus 2
  REGION 1..17: note = Table B: HLA-DPA1*01:02-B1*04:01L
ISTEIYQAGSTPCNGVE

SEQ ID NO: 25749 - protein, 10 aa, Severe acute respiratory syndrome coronavirus 2
  REGION 1..10: note = Table B: HLA-DPA1*01:02-B1*04:01L
VVVLSFELLH

SEQ ID NO: 25750 - protein, 10 aa, Severe acute respiratory syndrome coronavirus 2
  REGION 1..10: note = Table B: HLA-DPA1*01:02-B1*04:01L
ICAQKFNGLT

SEQ ID NO: 25751 - protein, 10 aa, Severe acute respiratory syndrome coronavirus 2
  REGION 1..10: note = Table B: HLA-DPA1*01:02-B1*04:01L
PHGVVFLHVT

SEQ ID NO: 25752 - protein, 10 aa, Severe acute respiratory syndrome coronavirus 2
  REGION 1..10: note = Table B: HLA-DPA1*01:02-B1*04:01L
FLHVTYVPAQ

SEQ ID NO: 25753 - protein, 11 aa, Severe acute respiratory syndrome coronavirus 2
  REGION 1..11: note = Table B: HLA-DPA1*01:02-B1*04:01L
NGTHWFVTQRN

SEQ ID NO: 25754 - protein, 11 aa, Severe acute respiratory syndrome coronavirus 2
  REGION 1..11: note = Table B: HLA-DPA1*01:02-B1*04:01L
GTHWFVTQRNF

SEQ ID NO: 25755 - protein, 10 aa, Severe acute respiratory syndrome coronavirus 2
  REGION 1..10: note = Table B: HLA-DPA1*01:02-B1*04:01L
YTEKWESGVK

SEQ ID NO: 25756 - protein, 11 aa, Severe acute respiratory syndrome coronavirus 2
  REGION 1..11: note = Table B: HLA-DPA1*01:02-B1*04:01L
YFTSDYYQLYS

SEQ ID NO: 25757 - protein, 13 aa, Severe acute respiratory syndrome coronavirus 2
  REGION 1..13: note = Table B: HLA-DPA1*01:02-B1*04:01L
TGVEHVTFFIYNK

SEQ ID NO: 25758 - protein, 12 aa, Severe acute respiratory syndrome coronavirus 2
  REGION 1..12: note = Table B: HLA-DPA1*01:02-B1*04:01L
VKPSFYVYSRVK

SEQ ID NO: 25759 - protein, 10 aa, Severe acute respiratory syndrome coronavirus 2
  REGION 1..10: note = Table B: HLA-DPA1*01:02-B1*04:01L HLA-DQA1*01:03-B1*06:01L
FYVYSRVKNL

SEQ ID NO: 25760 - protein, 11 aa, Severe acute respiratory syndrome coronavirus 2
  REGION 1..11: note = Table B: HLA-DPA1*01:02-B1*04:01L
ITVEELKKLLE

SEQ ID NO: 25761 - protein, 10 aa, Severe acute respiratory syndrome coronavirus 2
  REGION 1..10: note = Table B: HLA-DPA1*01:02-B1*04:01L
NRNRFLYIIK

SEQ ID NO: 25762 - protein, 11 aa, Severe acute respiratory syndrome coronavirus 2
  REGION 1..11: note = Table B: HLA-DPA1*01:02-B1*04:01L
FIASFRLFART

SEQ ID NO: 25763 - protein, 12 aa, Severe acute respiratory syndrome coronavirus 2
  REGION 1..12: note = Table B: HLA-DPA1*01:02-B1*04:01L
AEILLIIMRTFK

SEQ ID NO: 25764 - protein, 15 aa, Severe acute respiratory syndrome coronavirus 2
  REGION 1..15: note = Table B: HLA-DPA1*01:02-B1*04:01L HLA-DRB1*16:01L HLA-DRB1*04:08L
LPNNTASWFTALTQH

SEQ ID NO: 25765 - protein, 12 aa, Severe acute respiratory syndrome coronavirus 2
  REGION 1..12: note = Table B: HLA-DPA1*01:02-B1*04:01L
TNSSPDDQIGYY

SEQ ID NO: 25766 - protein, 10 aa, Severe acute respiratory syndrome coronavirus 2
  REGION 1..10: note = Table B: HLA-DPA1*01:02-B1*04:01L
LALLLLDRLN

SEQ ID NO: 25767 - protein, 11 aa, Severe acute respiratory syndrome coronavirus 2
  REGION 1..11: note = Table B: HLA-DPA1*01:02-B1*04:01L
ASAFFGMSRIG

SEQ ID NO: 25768 - protein, 11 aa, Severe acute respiratory syndrome coronavirus 2
  REGION 1..11: note = Table B: HLA-DPA1*01:02-B1*04:01L
FKDQVILLNKH

SEQ ID NO: 25769 - protein, 16 aa, Severe acute respiratory syndrome coronavirus 2
  REGION 1..16: note = Table B: HLA-DRB1*07:01L
DSVEEVLSEARQHLKD

SEQ ID NO: 25770 - protein, 14 aa, Severe acute respiratory syndrome coronavirus 2
  REGION 1..14: note = Table B: HLA-DRB1*07:01L
LVPHVGEIPVAYRK

SEQ ID NO: 25771 - protein, 17 aa, Severe acute respiratory syndrome coronavirus 2
  REGION 1..17: note = Table B: HLA-DRB1*07:01L
IGEQKSILSPLYAFASE

SEQ ID NO: 25772 - protein, 16 aa, Severe acute respiratory syndrome coronavirus 2
  REGION 1..16: note = Table B: HLA-DRB1*07:01L
DGSEDNQTTTIQTIVE

SEQ ID NO: 25773 - protein, 14 aa, Severe acute respiratory syndrome coronavirus 2
  REGION 1..14: note = Table B: HLA-DRB1*07:01L
EVNSFSGYLKLTDN

SEQ ID NO: 25774 - protein, 14 aa, Severe acute respiratory syndrome coronavirus 2
  REGION 1..14: note = Table B: HLA-DRB1*07:01L
EGKTFYVLPNDDTL

SEQ ID NO: 25775 - protein, 15 aa, Severe acute respiratory syndrome coronavirus 2
  REGION 1..15: note = Table B: HLA-DRB1*07:01L
LGDVRETMSYLFQHA

SEQ ID NO: 25776 - protein, 16 aa, Severe acute respiratory syndrome coronavirus 2
  REGION 1..16: note = Table B: HLA-DRB1*07:01L HLA-DRB1*10:01L
FDNFKFVCDNIKFADD

SEQ ID NO: 25777 - protein, 16 aa, Severe acute respiratory syndrome coronavirus 2
  REGION 1..16: note = Table B: HLA-DRB1*07:01L
SIHLYFDKAGQKTYER

SEQ ID NO: 25778 - protein, 15 aa, Severe acute respiratory syndrome coronavirus 2
  REGION 1..15: note = Table B: HLA-DRB1*07:01L
TNDKACPLIAAVITR

SEQ ID NO: 25779 - protein, 16 aa, Severe acute respiratory syndrome coronavirus 2
  REGION 1..16: note = Table B: HLA-DRB1*07:01L
LKRRVVFNGVSFSTFE

SEQ ID NO: 25780 - protein, 12 aa, Severe acute respiratory syndrome coronavirus 2
  REGION 1..12: note = Table B: HLA-DRB1*07:01L
DYLVSTQEFRYM

SEQ ID NO: 25781 - protein, 17 aa, Severe acute respiratory syndrome coronavirus 2
  REGION 1..17: note = Table B: HLA-DRB1*07:01L
ISRQRLTKYTMADLVYA

SEQ ID NO: 25782 - protein, 12 aa, Severe acute respiratory syndrome coronavirus 2
  REGION 1..12: note = Table B: HLA-DRB1*07:01L
LRVYANLGERVR

SEQ ID NO: 25783 - protein, 14 aa, Severe acute respiratory syndrome coronavirus 2
  REGION 1..14: note = Table B: HLA-DRB1*07:01L
RFYRLANECAQVLS

SEQ ID NO: 25784 - protein, 16 aa, Severe acute respiratory syndrome coronavirus 2
  REGION 1..16: note = Table B: HLA-DRB1*07:01L
NGQVFGLYKNTCVGSD

SEQ ID NO: 25785 - protein, 14 aa, Severe acute respiratory syndrome coronavirus 2
  REGION 1..14: note = Table B: HLA-DRB1*07:01L
NRNYVFTGYRVTKN

SEQ ID NO: 25786 - protein, 14 aa, Severe acute respiratory syndrome coronavirus 2
  REGION 1..14: note = Table B: HLA-DRB1*07:01L
YGDAVVYRGTTTYK

SEQ ID NO: 25787 - protein, 11 aa, Severe acute respiratory syndrome coronavirus 2
  REGION 1..11: note = Table B: HLA-DRB1*07:01L
TTYKLNVGDYF

SEQ ID NO: 25788 - protein, 14 aa, Severe acute respiratory syndrome coronavirus 2
  REGION 1..14: note = Table B: HLA-DRB1*07:01L
VREFLTRNPAWRKA

SEQ ID NO: 25789 - protein, 14 aa, Severe acute respiratory syndrome coronavirus 2
  REGION 1..14: note = Table B: HLA-DRB1*07:01L HLA-DRB1*04:08L
TREAVGTNLPLQLG

SEQ ID NO: 25790 - protein, 14 aa, Severe acute respiratory syndrome coronavirus 2
  REGION 1..14: note = Table B: HLA-DRB1*07:01L
FDYVYNPFMIDVQQ

SEQ ID NO: 25791 - protein, 14 aa, Severe acute respiratory syndrome coronavirus 2
  REGION 1..14: note = Table B: HLA-DRB1*07:01L HLA-DRB1*10:01L
LWVYKQFDTYNLWN

SEQ ID NO: 25792 - protein, 16 aa, Severe acute respiratory syndrome coronavirus 2
  REGION 1..16: note = Table B: HLA-DRB1*07:01L
DEFIERYKLEGYAFEH

SEQ ID NO: 25793 - protein, 16 aa, Severe acute respiratory syndrome coronavirus 2
  REGION 1..16: note = Table B: HLA-DRB1*07:01L
VPYNMRVIHFGAGSDK

SEQ ID NO: 25794 - protein, 12 aa, Severe acute respiratory syndrome coronavirus 2
  REGION 1..12: note = Table B: HLA-DRB1*07:01L
LALGGSVAIKIT

SEQ ID NO: 25795 - protein, 14 aa, Severe acute respiratory syndrome coronavirus 2
  REGION 1..14: note = Table B: HLA-DRB1*07:01L
SKGRLIIRENNRVV

SEQ ID NO: 25796 - protein, 17 aa, Severe acute respiratory syndrome coronavirus 2
  REGION 1..17: note = Table B: HLA-DRB1*07:01L
PPAYTNSFTRGVYYPDK

SEQ ID NO: 25797 - protein, 16 aa, Severe acute respiratory syndrome coronavirus 2
  REGION 1..16: note = Table B: HLA-DRB1*07:01L
LDSKTQSLLIVNNATN

SEQ ID NO: 25798 - protein, 14 aa, Severe acute respiratory syndrome coronavirus 2
  REGION 1..14: note = Table B: HLA-DRB1*07:01L
NDPFLGVYYHKNNK

SEQ ID NO: 25799 - protein, 14 aa, Severe acute respiratory syndrome coronavirus 2
  REGION 1..14: note = Table B: HLA-DRB1*07:01L
ALHRSYLTPGDSSS

SEQ ID NO: 25800 - protein, 15 aa, Severe acute respiratory syndrome coronavirus 2
  REGION 1..15: note = Table B: HLA-DRB1*07:01L
NRKRISNCVADYSVL

SEQ ID NO: 25801 - protein, 14 aa, Severe acute respiratory syndrome coronavirus 2
  REGION 1..14: note = Table B: HLA-DRB1*07:01L
QIAPGQTGKIADYN

SEQ ID NO: 25802 - protein, 15 aa, Severe acute respiratory syndrome coronavirus 2
  REGION 1..15: note = Table B: HLA-DRB1*07:01L
DEMIAQYTSALLAGT

SEQ ID NO: 25803 - protein, 14 aa, Severe acute respiratory syndrome coronavirus 2
  REGION 1..14: note = Table B: HLA-DRB1*07:01L
EIDRLNEVAKNLNE

SEQ ID NO: 25804 - protein, 17 aa, Severe acute respiratory syndrome coronavirus 2
  REGION 1..17: note = Table B: HLA-DRB1*07:01L
VTSSIVITSGDGTTSPI

SEQ ID NO: 25805 - protein, 15 aa, Severe acute respiratory syndrome coronavirus 2
  REGION 1..15: note = Table B: HLA-DRB1*07:01L
NLDYIINLIIKNLSK

SEQ ID NO: 25806 - protein, 15 aa, Severe acute respiratory syndrome coronavirus 2
  REGION 1..15: note = Table B: HLA-DRB1*07:01L
IGTRNPANNAAIVLQ

SEQ ID NO: 25807 - protein, 14 aa, Severe acute respiratory syndrome coronavirus 2
  REGION 1..14: note = Table B: HLA-DRB1*07:01L
TATKAYNVTQAFGR

SEQ ID NO: 25808 - protein, 17 aa, Severe acute respiratory syndrome coronavirus 2
  REGION 1..17: note = Table B: HLA-DRB1*07:01L
DKKKKADETQALPQRQK

SEQ ID NO: 25809 - protein, 12 aa, Severe acute respiratory syndrome coronavirus 2
  REGION 1..12: note = Table B: HLA-DRB1*10:01L HLA-DRB1*15:03L
GYKAIDGGVTRD

SEQ ID NO: 25810 - protein, 15 aa, Severe acute respiratory syndrome coronavirus 2
  REGION 1..15: note = Table B: HLA-DRB1*10:01L
LPRVFSAVGNICYTP

SEQ ID NO: 25811 - protein, 14 aa, Severe acute respiratory syndrome coronavirus 2
  REGION 1..14: note = Table B: HLA-DRB1*10:01L HLA-DRB1*15:01L
MSAFAMMFVKHKHA

SEQ ID NO: 25812 - protein, 12 aa, Severe acute respiratory syndrome coronavirus 2
  REGION 1..12: note = Table B: HLA-DRB1*10:01L
DGTLMIERFVSL

SEQ ID NO: 25813 - protein, 15 aa, Severe acute respiratory syndrome coronavirus 2
  REGION 1..15: note = Table B: HLA-DRB1*10:01L
KGDYGDAVVYRGTTT

SEQ ID NO: 25814 - protein, 16 aa, Severe acute respiratory syndrome coronavirus 2
  REGION 1..16: note = Table B: HLA-DRB1*10:01L
KAALLADKFPVLHDIG

SEQ ID NO: 25815 - protein, 14 aa, Severe acute respiratory syndrome coronavirus 2
  REGION 1..14: note = Table B: HLA-DRB1*10:01L
FAWWTAFVTNVNAS

SEQ ID NO: 25816 - protein, 17 aa, Severe acute respiratory syndrome coronavirus 2
  REGION 1..17: note = Table B: HLA-DRB1*10:01L HLA-DRB1*08:02L
SNKKFLPFQQFGRDIAD

SEQ ID NO: 25817 - protein, 13 aa, Severe acute respiratory syndrome coronavirus 2
  REGION 1..13: note = Table B: HLA-DRB1*10:01L HLA-DRB1*08:03L
FLEYHDVRVVLDF

SEQ ID NO: 25818 - protein, 14 aa, Severe acute respiratory syndrome coronavirus 2
  REGION 1..14: note = Table B: HLA-DRB1*10:01L
AIVLQLPQGTTLPK

SEQ ID NO: 25819 - protein, 16 aa, Severe acute respiratory syndrome coronavirus 2
  REGION 1..16: note = Table B: HLA-DRB1*10:01L
DAALALLLLDRLNQLE

SEQ ID NO: 25820 - protein, 11 aa, Severe acute respiratory syndrome coronavirus 2
  REGION 1..11: note = Table B: HLA-DRB1*16:01L HLA-DQA1*02:01-B1*03:03L
EIAWYTERSEK

SEQ ID NO: 25821 - protein, 14 aa, Severe acute respiratory syndrome coronavirus 2
  REGION 1..14: note = Table B: HLA-DRB1*16:01L HLA-DRB1*15:03L
IKTIQPRVEKKKLD

SEQ ID NO: 25822 - protein, 11 aa, Severe acute respiratory syndrome coronavirus 2
  REGION 1..11: note = Table B: HLA-DRB1*16:01L
KKLDGFMGRIR

SEQ ID NO: 25823 - protein, 12 aa, Severe acute respiratory syndrome coronavirus 2
  REGION 1..12: note = Table B: HLA-DRB1*16:01L HLA-DRB1*15:03L
SLAEYHNESGLK

SEQ ID NO: 25824 - protein, 13 aa, Severe acute respiratory syndrome coronavirus 2
  REGION 1..13: note = Table B: HLA-DRB1*16:01L HLA-DQA1*01:03-B1*06:01L
VGEGSEGLNDNLL

SEQ ID NO: 25825 - protein, 14 aa, Severe acute respiratory syndrome coronavirus 2
  REGION 1..14: note = Table B: HLA-DRB1*16:01L HLA-DRB1*04:08L HLA-DRB1*15:03L
IVESCGNFKVTKGK

SEQ ID NO: 25826 - protein, 15 aa, Severe acute respiratory syndrome coronavirus 2
  REGION 1..15: note = Table B: HLA-DRB1*16:01L
DEEEGDCEEEEFEPS

SEQ ID NO: 25827 - protein, 14 aa, Severe acute respiratory syndrome coronavirus 2
  REGION 1..14: note = Table B: HLA-DRB1*16:01L
EPSTQYEYGTEDDY

SEQ ID NO: 25828 - protein, 12 aa, Severe acute respiratory syndrome coronavirus 2
  REGION 1..12: note = Table B: HLA-DRB1*16:01L
TSAALQPEEEQE

SEQ ID NO: 25829 - protein, 12 aa, Severe acute respiratory syndrome coronavirus 2
  REGION 1..12: note = Table B: HLA-DRB1*16:01L
LQPEEEQEEDWL

SEQ ID NO: 25830 - protein, 14 aa, Severe acute respiratory syndrome coronavirus 2
  REGION 1..14: note = Table B: HLA-DRB1*16:01L
QPEEEQEEDWLDDD

SEQ ID NO: 25831 - protein, 14 aa, Severe acute respiratory syndrome coronavirus 2
  REGION 1..14: note = Table B: HLA-DRB1*16:01L
EQEEDWLDDDSQQT

SEQ ID NO: 25832 - protein, 13 aa, Severe acute respiratory syndrome coronavirus 2
  REGION 1..13: note = Table B: HLA-DRB1*16:01L
TRKLMPVCVETKA

SEQ ID NO: 25833 - protein, 12 aa, Severe acute respiratory syndrome coronavirus 2
  REGION 1..12: note = Table B: HLA-DRB1*16:01L HLA-DQA1*01:03-B1*06:01L HLA-DQA1*02:01-B1*03:03L
YNGYLTSSSKTP

SEQ ID NO: 25834 - protein, 12 aa, Severe acute respiratory syndrome coronavirus 2
  REGION 1..12: note = Table B: HLA-DRB1*16:01L
TPEEHFIETISL

SEQ ID NO: 25835 - protein, 10 aa, Severe acute respiratory syndrome coronavirus 2
  REGION 1..10: note = Table B: HLA-DRB1*16:01L HLA-DQA1*02:01-B1*03:03L
SLREVRTIKV

SEQ ID NO: 25836 - protein, 14 aa, Severe acute respiratory syndrome coronavirus 2
  REGION 1..14: note = Table B: HLA-DRB1*16:01L HLA-DRB1*04:08L HLA-DRB1*15:03L
PSFLGRYMSALNHT

SEQ ID NO: 25837 - protein, 12 aa, Severe acute respiratory syndrome coronavirus 2
  REGION 1..12: note = Table B: HLA-DRB1*16:01L HLA-DRB1*04:08L
YQCGHYKHITSK

SEQ ID NO: 25838 - protein, 14 aa, Severe acute respiratory syndrome coronavirus 2
  REGION 1..14: note = Table B: HLA-DRB1*16:01L
SKETLYCIDGALLT

SEQ ID NO: 25839 - protein, 12 aa, Severe acute respiratory syndrome coronavirus 2
  REGION 1..12: note = Table B: HLA-DRB1*16:01L HLA-DQA1*01:03-B1*06:01L HLA-DQA1*02:01-B1*03:03L
KDNSYFTEQPID

SEQ ID NO: 25840 - protein, 12 aa, Severe acute respiratory syndrome coronavirus 2
  REGION 1..12: note = Table B: HLA-DRB1*16:01L HLA-DRB1*15:03L
LKVTFFPDLNGD

SEQ ID NO: 25841 - protein, 12 aa, Severe acute respiratory syndrome coronavirus 2
  REGION 1..12: note = Table B: HLA-DRB1*16:01L
DLNGDVVAIDYK

SEQ ID NO: 25842 - protein, 15 aa, Severe acute respiratory syndrome coronavirus 2
  REGION 1..15: note = Table B: HLA-DRB1*16:01L
FKKGAKLLHKPIVWH

SEQ ID NO: 25843 - protein, 10 aa, Severe acute respiratory syndrome coronavirus 2
  REGION 1..10: note = Table B: HLA-DRB1*16:01L
KTLATHGLAA

SEQ ID NO: 25844 - protein, 16 aa, Severe acute respiratory syndrome coronavirus 2
  REGION 1..16: note = Table B: HLA-DRB1*16:01L
TLLLQLCTFTRSTNSR

SEQ ID NO: 25845 - protein, 12 aa, Severe acute respiratory syndrome coronavirus 2
  REGION 1..12: note = Table B: HLA-DRB1*16:01L HLA-DRB1*04:08L
YILFTRFFYVLG

SEQ ID NO: 25846 - protein, 12 aa, Severe acute respiratory syndrome coronavirus 2
  REGION 1..12: note = Table B: HLA-DRB1*16:01L HLA-DRB1*15:03L
GSIHLYFDKAGQ

SEQ ID NO: 25847 - protein, 12 aa, Severe acute respiratory syndrome coronavirus 2
  REGION 1..12: note = Table B: HLA-DRB1*16:01L HLA-DRB1*04:08L
LAYYFMRFRRAF

SEQ ID NO: 25848 - protein, 13 aa, Severe acute respiratory syndrome coronavirus 2
  REGION 1..13: note = Table B: HLA-DRB1*16:01L
DVSFLAHIQWMVM

SEQ ID NO: 25849 - protein, 11 aa, Severe acute respiratory syndrome coronavirus 2
  REGION 1..11: note = Table B: HLA-DRB1*16:01L HLA-DRB1*15:03L
HFYWFFSNYLK

SEQ ID NO: 25850 - protein, 11 aa, Severe acute respiratory syndrome coronavirus 2
  REGION 1..11: note = Table B: HLA-DRB1*16:01L HLA-DQA1*01:03-B1*06:01L
LNPNYEDLLIR

SEQ ID NO: 25851 - protein, 10 aa, Severe acute respiratory syndrome coronavirus 2
  REGION 1..10: note = Table B: HLA-DRB1*16:01L HLA-DQA1*01:03-B1*06:01L HLA-DQA1*02:01-B1*03:03L HLA-DRB1*15:03L
VYKVYYGNAL

SEQ ID NO: 25852 - protein, 11 aa, Severe acute respiratory syndrome coronavirus 2
  REGION 1..11: note = Table B: HLA-DRB1*16:01L
LLAKDTTEAFE

SEQ ID NO: 25853 - protein, 13 aa, Severe acute respiratory syndrome coronavirus 2
  REGION 1..13: note = Table B: HLA-DRB1*16:01L
AKDTTEAFEKMVS

SEQ ID NO: 25854 - protein, 13 aa, Severe acute respiratory syndrome coronavirus 2
  REGION 1..13: note = Table B: HLA-DRB1*16:01L
ATAQEAYEQAVAN

SEQ ID NO: 25855 - protein, 11 aa, Severe acute respiratory syndrome coronavirus 2
  REGION 1..11: note = Table B: HLA-DRB1*16:01L
RKLEKMADQAM

SEQ ID NO: 25856 - protein, 12 aa, Severe acute respiratory syndrome coronavirus 2
  REGION 1..12: note = Table B: HLA-DRB1*16:01L
QTMLFTMLRKLD

SEQ ID NO: 25857 - protein, 12 aa, Severe acute respiratory syndrome coronavirus 2
  REGION 1..12: note = Table B: HLA-DRB1*16:01L HLA-DQA1*01:03-B1*06:01L HLA-DRB1*15:03L
NALAYYNTTKGG

SEQ ID NO: 25858 - protein, 11 aa, Severe acute respiratory syndrome coronavirus 2
  REGION 1..11: note = Table B: HLA-DRB1*16:01L HLA-DQA1*01:03-B1*06:01L
NLIDSYFVVKR

SEQ ID NO: 25859 - protein, 13 aa, Severe acute respiratory syndrome coronavirus 2
  REGION 1..13: note = Table B: HLA-DRB1*16:01L
QALLKTVQFCDAM

SEQ ID NO: 25860 - protein, 13 aa, Severe acute respiratory syndrome coronavirus 2
  REGION 1..13: note = Table B: HLA-DRB1*16:01L
NGNWYDFGDFIQT

SEQ ID NO: 25861 - protein, 13 aa, Severe acute respiratory syndrome coronavirus 2
  REGION 1..13: note = Table B: HLA-DRB1*16:01L HLA-DRB1*04:08L HLA-DRB1*15:03L
LKLFDRYFKYWDQ

SEQ ID NO: 25862 - protein, 12 aa, Severe acute respiratory syndrome coronavirus 2
  REGION 1..12: note = Table B: HLA-DRB1*16:01L
HFFFAQDGNAAI

SEQ ID NO: 25863 - protein, 11 aa, Severe acute respiratory syndrome coronavirus 2
  REGION 1..11: note = Table B: HLA-DRB1*16:01L HLA-DQA1*01:03-B1*06:01L
DSMSYEDQDAL

SEQ ID NO: 25864 - protein, 14 aa, Severe acute respiratory syndrome coronavirus 2
  REGION 1..14: note = Table B: HLA-DRB1*16:01L HLA-DRB1*04:08L
RNLQHRLYECLYRN

SEQ ID NO: 25865 - protein, 12 aa, Severe acute respiratory syndrome coronavirus 2
  REGION 1..12: note = Table B: HLA-DRB1*16:01L
LQYIRKLHDELT

SEQ ID NO: 25866 - protein, 14 aa, Severe acute respiratory syndrome coronavirus 2
  REGION 1..14: note = Table B: HLA-DRB1*16:01L
DVTDVTQLYLGGMS

SEQ ID NO: 25867 - protein, 10 aa, Severe acute respiratory syndrome coronavirus 2
  REGION 1..10: note = Table B: HLA-DRB1*16:01L
GYRVTKNSKV

SEQ ID NO: 25868 - protein, 12 aa, Severe acute respiratory syndrome coronavirus 2
  REGION 1..12: note = Table B: HLA-DRB1*16:01L
ARIVYTACSHAA

SEQ ID NO: 25869 - protein, 12 aa, Severe acute respiratory syndrome coronavirus 2
  REGION 1..12: note = Table B: HLA-DRB1*16:01L
VECFDKFKVNST

SEQ ID NO: 25870 - protein, 10 aa, Severe acute respiratory syndrome coronavirus 2
  REGION 1..10: note = Table B: HLA-DRB1*16:01L HLA-DQA1*02:01-B1*03:03L
MFYKGVITHD

SEQ ID NO: 25871 - protein, 11 aa, Severe acute respiratory syndrome coronavirus 2
  REGION 1..11: note = Table B: HLA-DRB1*16:01L
EFLTRNPAWRK

SEQ ID NO: 25872 - protein, 10 aa, Severe acute respiratory syndrome coronavirus 2
  REGION 1..10: note = Table B: HLA-DRB1*16:01L
ITREEAIRHV

SEQ ID NO: 25873 - protein, 10 aa, Severe acute respiratory syndrome coronavirus 2
  REGION 1..10: note = Table B: HLA-DRB1*16:01L HLA-DQA1*01:03-B1*06:01L HLA-DQA1*02:01-B1*03:03L HLA-DRB1*15:03L
WHHSIGFDYV

SEQ ID NO: 25874 - protein, 10 aa, Severe acute respiratory syndrome coronavirus 2
  REGION 1..10: note = Table B: HLA-DRB1*16:01L
THSDKFTDGV

SEQ ID NO: 25875 - protein, 13 aa, Severe acute respiratory syndrome coronavirus 2
  REGION 1..13: note = Table B: HLA-DRB1*16:01L HLA-DRB1*04:08L
PFFYYSDSPCESH

SEQ ID NO: 25876 - protein, 10 aa, Severe acute respiratory syndrome coronavirus 2
  REGION 1..10: note = Table B: HLA-DRB1*16:01L
DYKRDAPAHI

SEQ ID NO: 25877 - protein, 15 aa, Severe acute respiratory syndrome coronavirus 2
  REGION 1..15: note = Table B: HLA-DRB1*16:01L HLA-DRB1*04:08L
DGRVDGQVDLFRNAR

SEQ ID NO: 25878 - protein, 11 aa, Severe acute respiratory syndrome coronavirus 2
  REGION 1..11: note = Table B: HLA-DRB1*16:01L
RYKLEGYAFEH

SEQ ID NO: 25879 - protein, 13 aa, Severe acute respiratory syndrome coronavirus 2
  REGION 1..13: note = Table B: HLA-DRB1*16:01L
GLHLLIGLAKRFK

SEQ ID NO: 25880 - protein, 11 aa, Severe acute respiratory syndrome coronavirus 2
  REGION 1..11: note = Table B: HLA-DRB1*16:01L
KRFKESPFELE

SEQ ID NO: 25881 - protein, 11 aa, Severe acute respiratory syndrome coronavirus 2
  REGION 1..11: note = Table B: HLA-DRB1*16:01L
VIHFGAGSDKG

SEQ ID NO: 25882 - protein, 11 aa, Severe acute respiratory syndrome coronavirus 2
  REGION 1..11: note = Table B: HLA-DRB1*16:01L
KLRGTAVMSLK

SEQ ID NO: 25883 - protein, 12 aa, Severe acute respiratory syndrome coronavirus 2
  REGION 1..12: note = Table B: HLA-DRB1*16:01L
NFKNLREFVFKN

SEQ ID NO: 25884 - protein, 10 aa, Severe acute respiratory syndrome coronavirus 2
  REGION 1..10: note = Table B: HLA-DRB1*16:01L HLA-DRB1*15:03L
IYQTSNFRVQ

SEQ ID NO: 25885 - protein, 11 aa, Severe acute respiratory syndrome coronavirus 2
  REGION 1..11: note = Table B: HLA-DRB1*16:01L
SNFRVQPTESI

SEQ ID NO: 25886 - protein, 11 aa, Severe acute respiratory syndrome coronavirus 2
  REGION 1..11: note = Table B: HLA-DRB1*16:01L HLA-DQA1*02:01-B1*03:03L HLA-DRB1*15:03L
KFLPFQQFGRD

SEQ ID NO: 25887 - protein, 10 aa, Severe acute respiratory syndrome coronavirus 2
  REGION 1..10: note = Table B: HLA-DRB1*16:01L
RARSVASQSI

SEQ ID NO: 25888 - protein, 12 aa, Severe acute respiratory syndrome coronavirus 2
  REGION 1..12: note = Table B: HLA-DRB1*16:01L HLA-DRB1*15:03L
QVKQIYKTPPIK

SEQ ID NO: 25889 - protein, 12 aa, Severe acute respiratory syndrome coronavirus 2
  REGION 1..12: note = Table B: HLA-DRB1*16:01L
EMIAQYTSALLA

SEQ ID NO: 25890 - protein, 16 aa, Severe acute respiratory syndrome coronavirus 2
  REGION 1..16: note = Table B: HLA-DRB1*16:01L
ATKMSECVLGQSKRVD

SEQ ID NO: 25891 - protein, 12 aa, Severe acute respiratory syndrome coronavirus 2
  REGION 1..12: note = Table B: HLA-DRB1*16:01L HLA-DRB1*04:08L
FLHVTYVPAQEK

SEQ ID NO: 25892 - protein, 10 aa, Severe acute respiratory syndrome coronavirus 2
  REGION 1..10: note = Table B: HLA-DRB1*16:01L HLA-DQA1*02:01-B1*03:03L
AVFQSASKII

SEQ ID NO: 25893 - protein, 14 aa, Severe acute respiratory syndrome coronavirus 2
  REGION 1..14: note = Table B: HLA-DRB1*16:01L HLA-DRB1*04:08L HLA-DRB1*15:03L
ITLKKRWQLALSKG

SEQ ID NO: 25894 - protein, 11 aa, Severe acute respiratory syndrome coronavirus 2
  REGION 1..11: note = Table B: HLA-DRB1*16:01L
VLHSYFTSDYY

SEQ ID NO: 25895 - protein, 11 aa, Severe acute respiratory syndrome coronavirus 2
  REGION 1..11: note = Table B: HLA-DRB1*16:01L HLA-DRB1*04:08L
DGSSGVVNPVM

SEQ ID NO: 25896 - protein, 15 aa, Severe acute respiratory syndrome coronavirus 2
  REGION 1..15: note = Table B: HLA-DRB1*16:01L HLA-DRB1*04:08L
GHHLGRCDIKDLPKE

SEQ ID NO: 25897 - protein, 10 aa, Severe acute respiratory syndrome coronavirus 2
  REGION 1..10: note = Table B: HLA-DRB1*16:01L HLA-DQA1*01:03-B1*06:01L HLA-DQA1*02:01-B1*03:03L
YYKLGASQRV

SEQ ID NO: 25898 - protein, 15 aa, Severe acute respiratory syndrome coronavirus 2
  REGION 1..15: note = Table B: HLA-DRB1*16:01L
NKFALTCFSTQFAFA

SEQ ID NO: 25899 - protein, 11 aa, Severe acute respiratory syndrome coronavirus 2
  REGION 1..11: note = Table B: HLA-DRB1*16:01L
PIHFYSKWYIR

SEQ ID NO: 25900 - protein, 15 aa, Severe acute respiratory syndrome coronavirus 2
  REGION 1..15: note = Table B: HLA-DRB1*16:01L
KEDLKFPRGQGVPIN

SEQ ID NO: 25901 - protein, 11 aa, Severe acute respiratory syndrome coronavirus 2
  REGION 1..11: note = Table B: HLA-DRB1*16:01L HLA-DQA1*02:01-B1*03:03L
FPRGQGVPINT

SEQ ID NO: 25902 - protein, 15 aa, Severe acute respiratory syndrome coronavirus 2
  REGION 1..15: note = Table B: HLA-DRB1*16:01L
RIRGGDGKMKDLSPR

SEQ ID NO: 25903 - protein, 15 aa, Severe acute respiratory syndrome coronavirus 2
  REGION 1..15: note = Table B: HLA-DRB1*16:01L
AEGSRGGSQASSRSS

SEQ ID NO: 25904 - protein, 12 aa, Severe acute respiratory syndrome coronavirus 2
  REGION 1..12: note = Table B: HLA-DRB1*16:01L HLA-DRB1*15:03L
KHIDAYKTFPPT

SEQ ID NO: 25905 - protein, 11 aa, Severe acute respiratory syndrome coronavirus 2
  REGION 1..11: note = Table B: HLA-DQA1*01:03-B1*06:01L
VQLSLPVLQVR

SEQ ID NO: 25906 - protein, 10 aa, Severe acute respiratory syndrome coronavirus 2
  REGION 1..10: note = Table B: HLA-DQA1*01:03-B1*06:01L
GTCGLVEVEK

SEQ ID NO: 25907 - protein, 11 aa, Severe acute respiratory syndrome coronavirus 2
  REGION 1..11: note = Table B: HLA-DQA1*01:03-B1*06:01L
EVEKGVLPQLE

SEQ ID NO: 25908 - protein, 14 aa, Severe acute respiratory syndrome coronavirus 2
  REGION 1..14: note = Table B: HLA-DQA1*01:03-B1*06:01L
TAPHGHVMVELVAE

SEQ ID NO: 25909 - protein, 11 aa, Severe acute respiratory syndrome coronavirus 2
  REGION 1..11: note = Table B: HLA-DQA1*01:03-B1*06:01L HLA-DQA1*02:01-B1*03:03L
ELEGIQYGRSG

SEQ ID NO: 25910 - protein, 12 aa, Severe acute respiratory syndrome coronavirus 2
  REGION 1..12: note = Table B: HLA-DQA1*01:03-B1*06:01L
RSGETLGVLVPH

SEQ ID NO: 25911 - protein, 10 aa, Severe acute respiratory syndrome coronavirus 2
  REGION 1..10: note = Table B: HLA-DQA1*01:03-B1*06:01L
TLGVLVPHVG

SEQ ID NO: 25912 - protein, 11 aa, Severe acute respiratory syndrome coronavirus 2
  REGION 1..11: note = Table B: HLA-DQA1*01:03-B1*06:01L
PHVGEIPVAYR

SEQ ID NO: 25913 - protein, 15 aa, Severe acute respiratory syndrome coronavirus 2
  REGION 1..15: note = Table B: HLA-DQA1*01:03-B1*06:01L
DLKSFDLGDELGTDP

SEQ ID NO: 25914 - protein, 15 aa, Severe acute respiratory syndrome coronavirus 2
  REGION 1..15: note = Table B: HLA-DQA1*01:03-B1*06:01L
SFDLGDELGTDPYED

SEQ ID NO: 25915 - protein, 10 aa, Severe acute respiratory syndrome coronavirus 2
  REGION 1..10: note = Table B: HLA-DQA1*01:03-B1*06:01L
SSGVTRELMR

SEQ ID NO: 25916 - protein, 15 aa, Severe acute respiratory syndrome coronavirus 2
  REGION 1..15: note = Table B: HLA-DQA1*01:03-B1*06:01L
YPLECIKDLLARAGK

SEQ ID NO: 25917 - protein, 12 aa, Severe acute respiratory syndrome coronavirus 2
  REGION 1..12: note = Table B: HLA-DQA1*01:03-B1*06:01L
QTGDFVKATCEF

SEQ ID NO: 25918 - protein, 11 aa, Severe acute respiratory syndrome coronavirus 2
  REGION 1..11: note = Table B: HLA-DQA1*01:03-B1*06:01L
FCGTENLTKEG

SEQ ID NO: 25919 - protein, 10 aa, Severe acute respiratory syndrome coronavirus 2
  REGION 1..10: note = Table B: HLA-DQA1*01:03-B1*06:01L
ATTCGYLPQN

SEQ ID NO: 25920 - protein, 10 aa, Severe acute respiratory syndrome coronavirus 2
  REGION 1..10: note = Table B: HLA-DQA1*01:03-B1*06:01L HLA-DQA1*02:01-B1*03:03L
NHTGVVGEGS

SEQ ID NO: 25921 - protein, 10 aa, Severe acute respiratory syndrome coronavirus 2
  REGION 1..10: note = Table B: HLA-DQA1*01:03-B1*06:01L HLA-DQA1*02:01-B1*03:03L
HTGVVGEGSE

SEQ ID NO: 25922 - protein, 12 aa, Severe acute respiratory syndrome coronavirus 2
  REGION 1..12: note = Table B: HLA-DQA1*01:03-B1*06:01L HLA-DQA1*02:01-B1*03:03L
TGVVGEGSEGLN

SEQ ID NO: 25923 - protein, 13 aa, Severe acute respiratory syndrome coronavirus 2
  REGION 1..13: note = Table B: HLA-DQA1*01:03-B1*06:01L
LNEEIAIILASFS

SEQ ID NO: 25924 - protein, 12 aa, Severe acute respiratory syndrome coronavirus 2
  REGION 1..12: note = Table B: HLA-DQA1*01:03-B1*06:01L
FSASTSAFVETV

SEQ ID NO: 25925 - protein, 15 aa, Severe acute respiratory syndrome coronavirus 2
  REGION 1..15: note = Table B: HLA-DQA1*01:03-B1*06:01L
GKAKKGAWNIGEQKS

SEQ ID NO: 25926 - protein, 10 aa, Severe acute respiratory syndrome coronavirus 2
  REGION 1..10: note = Table B: HLA-DQA1*01:03-B1*06:01L
YITGGVVQLT

SEQ ID NO: 25927 - protein, 10 aa, Severe acute respiratory syndrome coronavirus 2
  REGION 1..10: note = Table B: HLA-DQA1*01:03-B1*06:01L
ITGGVVQLTS

SEQ ID NO: 25928 - protein, 10 aa, Severe acute respiratory syndrome coronavirus 2
  REGION 1..10: note = Table B: HLA-DQA1*01:03-B1*06:01L
TGGVVQLTSQ

SEQ ID NO: 25929 - protein, 10 aa, Severe acute respiratory syndrome coronavirus 2
  REGION 1..10: note = Table B: HLA-DQA1*01:03-B1*06:01L
LTSQWLTNIF

SEQ ID NO: 25930 - protein, 11 aa, Severe acute respiratory syndrome coronavirus 2
  REGION 1..11: note = Table B: HLA-DQA1*01:03-B1*06:01L
QWLTNIFGTVY

SEQ ID NO: 25931 - protein, 10 aa, Severe acute respiratory syndrome coronavirus 2
  REGION 1..10: note = Table B: HLA-DQA1*01:03-B1*06:01L
IVGGQIVTCA

SEQ ID NO: 25932 - protein, 10 aa, Severe acute respiratory syndrome coronavirus 2
  REGION 1..10: note = Table B: HLA-DQA1*01:03-B1*06:01L
VGGQIVTCAK

SEQ ID NO: 25933 - protein, 10 aa, Severe acute respiratory syndrome coronavirus 2
  REGION 1..10: note = Table B: HLA-DQA1*01:03-B1*06:01L HLA-DQA1*02:01-B1*03:03L
IIGGAKLKAL

SEQ ID NO: 25934 - protein, 10 aa, Severe acute respiratory syndrome coronavirus 2
  REGION 1..10: note = Table B: HLA-DQA1*01:03-B1*06:01L
ETGLLMPLKA

SEQ ID NO: 25935 - protein, 10 aa, Severe acute respiratory syndrome coronavirus 2
  REGION 1..10: note = Table B: HLA-DQA1*01:03-B1*06:01L
TGLLMPLKAP

SEQ ID NO: 25936 - protein, 10 aa, Severe acute respiratory syndrome coronavirus 2
  REGION 1..10: note = Table B: HLA-DQA1*01:03-B1*06:01L
LMPLKAPKEI

SEQ ID NO: 25937 - protein, 12 aa, Severe acute respiratory syndrome coronavirus 2
  REGION 1..12: note = Table B: HLA-DQA1*01:03-B1*06:01L
LEGETLPTEVLT

SEQ ID NO: 25938 - protein, 10 aa, Severe acute respiratory syndrome coronavirus 2
  REGION 1..10: note = Table B: HLA-DQA1*01:03-B1*06:01L
VLKTGDLQPL

SEQ ID NO: 25939 - protein, 10 aa, Severe acute respiratory syndrome coronavirus 2
  REGION 1..10: note = Table B: HLA-DQA1*01:03-B1*06:01L
KTGDLQPLEQ

SEQ ID NO: 25940 - protein, 14 aa, Severe acute respiratory syndrome coronavirus 2
  REGION 1..14: note = Table B: HLA-DQA1*01:03-B1*06:01L HLA-DQA1*02:01-B1*03:03L
PLEQPTSEAVEAPL

SEQ ID NO: 25941 - protein, 12 aa, Severe acute respiratory syndrome coronavirus 2
  REGION 1..12: note = Table B: HLA-DQA1*01:03-B1*06:01L
ADAVIKTLQPVS

SEQ ID NO: 25942 - protein, 18 aa, Severe acute respiratory syndrome coronavirus 2
  REGION 1..18: note = Table B: HLA-DQA1*01:03-B1*06:01L
YPPDEDEEEGDCEEEEFE

SEQ ID NO: 25943 - protein, 10 aa, Severe acute respiratory syndrome coronavirus 2
  REGION 1..10: note = Table B: HLA-DQA1*01:03-B1*06:01L
ATSAALQPEE

SEQ ID NO: 25944 - protein, 16 aa, Severe acute respiratory syndrome coronavirus 2
  REGION 1..16: note = Table B: HLA-DQA1*01:03-B1*06:01L
QPEEEQEEDWLDDDSQ

SEQ ID NO: 25945 - protein, 13 aa, Severe acute respiratory syndrome coronavirus 2
  REGION 1..13: note = Table B: HLA-DQA1*01:03-B1*06:01L HLA-DQA1*02:01-B1*03:03L
SQQTVGQQDGSED

SEQ ID NO: 25946 - protein, 10 aa, Severe acute respiratory syndrome coronavirus 2
  REGION 1..10: note = Table B: HLA-DQA1*01:03-B1*06:01L
NQTTTIQTIV

SEQ ID NO: 25947 - protein, 11 aa, Severe acute respiratory syndrome coronavirus 2
  REGION 1..11: note = Table B: HLA-DQA1*01:03-B1*06:01L
VQTIEVNSFSG

SEQ ID NO: 25948 - protein, 11 aa, Severe acute respiratory syndrome coronavirus 2
  REGION 1..11: note = Table B: HLA-DQA1*01:03-B1*06:01L HLA-DQA1*02:01-B1*03:03L
VNAANVYLKHG

SEQ ID NO: 25949 - protein, 10 aa, Severe acute respiratory syndrome coronavirus 2
  REGION 1..10: note = Table B: HLA-DQA1*01:03-B1*06:01L HLA-DQA1*02:01-B1*03:03L
AGALNKATNN

SEQ ID NO: 25950 - protein, 11 aa, Severe acute respiratory syndrome coronavirus 2
  REGION 1..11: note = Table B: HLA-DQA1*01:03-B1*06:01L
ATNGPLKVGGS

SEQ ID NO: 25951 - protein, 10 aa, Severe acute respiratory syndrome coronavirus 2
  REGION 1..10: note = Table B: HLA-DQA1*01:03-B1*06:01L
GGSCVLSGHN

SEQ ID NO: 25952 - protein, 12 aa, Severe acute respiratory syndrome coronavirus 2
  REGION 1..12: note = Table B: HLA-DQA1*01:03-B1*06:01L
PNVNKGEDIQLL

SEQ ID NO: 25953 - protein, 10 aa, Severe acute respiratory syndrome coronavirus 2
  REGION 1..10: note = Table B: HLA-DQA1*01:03-B1*06:01L
NKGEDIQLLK

SEQ ID NO: 25954 - protein, 12 aa, Severe acute respiratory syndrome coronavirus 2
  REGION 1..12: note = Table B: HLA-DQA1*01:03-B1*06:01L
LLSAGIFGADPI

SEQ ID NO: 25955 - protein, 15 aa, Severe acute respiratory syndrome coronavirus 2
  REGION 1..15: note = Table B: HLA-DQA1*01:03-B1*06:01L
SEKQVEQKIAEIPKE

SEQ ID NO: 25956 - protein, 11 aa, Severe acute respiratory syndrome coronavirus 2
  REGION 1..11: note = Table B: HLA-DQA1*01:03-B1*06:01L
IKACVEEVTTT

SEQ ID NO: 25957 - protein, 10 aa, Severe acute respiratory syndrome coronavirus 2
  REGION 1..10: note = Table B: HLA-DQA1*01:03-B1*06:01L
TTTLEETKFL

SEQ ID NO: 25958 - protein, 11 aa, Severe acute respiratory syndrome coronavirus 2
  REGION 1..11: note = Table B: HLA-DQA1*01:03-B1*06:01L
PDSATLVSDID

SEQ ID NO: 25959 - protein, 10 aa, Severe acute respiratory syndrome coronavirus 2
  REGION 1..10: note = Table B: HLA-DQA1*01:03-B1*06:01L HLA-DQA1*02:01-B1*03:03L
TAVVIPTKKA

SEQ ID NO: 25960 - protein, 10 aa, Severe acute respiratory syndrome coronavirus 2
  REGION 1..10: note = Table B: HLA-DQA1*01:03-B1*06:01L
ETKAIVSTIQ

SEQ ID NO: 25961 - protein, 10 aa, Severe acute respiratory syndrome coronavirus 2
  REGION 1..10: note = Table B: HLA-DQA1*01:03-B1*06:01L
SKTTVASLIN

SEQ ID NO: 25962 - protein, 10 aa, Severe acute respiratory syndrome coronavirus 2
  REGION 1..10: note = Table B: HLA-DQA1*01:03-B1*06:01L
TVASLINTLN

SEQ ID NO: 25963 - protein, 12 aa, Severe acute respiratory syndrome coronavirus 2
  REGION 1..12: note = Table B: HLA-DQA1*01:03-B1*06:01L
NETLVTMPLGYV

SEQ ID NO: 25964 - protein, 11 aa, Severe acute respiratory syndrome coronavirus 2
  REGION 1..11: note = Table B: HLA-DQA1*01:03-B1*06:01L
VTHGLNLEEAA

SEQ ID NO: 25965 - protein, 12 aa, Severe acute respiratory syndrome coronavirus 2
  REGION 1..12: note = Table B: HLA-DQA1*01:03-B1*06:01L
SGQSTQLGIEFL

SEQ ID NO: 25966 - protein, 13 aa, Severe acute respiratory syndrome coronavirus 2
  REGION 1..13: note = Table B: HLA-DQA1*01:03-B1*06:01L
TSNPTTFHLDGEV

SEQ ID NO: 25967 - protein, 16 aa, Severe acute respiratory syndrome coronavirus 2
  REGION 1..16: note = Table B: HLA-DQA1*01:03-B1*06:01L
DNLKTLLSLREVRTIK

SEQ ID NO: 25968 - protein, 10 aa, Severe acute respiratory syndrome coronavirus 2
  REGION 1..10: note = Table B: HLA-DQA1*01:03-B1*06:01L
LDGADVTKIK

SEQ ID NO: 25969 - protein, 16 aa, Severe acute respiratory syndrome coronavirus 2
  REGION 1..16: note = Table B: HLA-DQA1*01:03-B1*06:01L
KPHNSHEGKTFYVLPN

SEQ ID NO: 25970 - protein, 11 aa, Severe acute respiratory syndrome coronavirus 2
  REGION 1..11: note = Table B: HLA-DQA1*01:03-B1*06:01L
ATALLTLQQIE

SEQ ID NO: 25971 - protein, 12 aa, Severe acute respiratory syndrome coronavirus 2
  REGION 1..12: note = Table B: HLA-DQA1*01:03-B1*06:01L
FNPPALQDAYYR

SEQ ID NO: 25972 - protein, 16 aa, Severe acute respiratory syndrome coronavirus 2
  REGION 1..16: note = Table B: HLA-DQA1*01:03-B1*06:01L
PPALQDAYYRARAGEA

SEQ ID NO: 25973 - protein, 12 aa, Severe acute respiratory syndrome coronavirus 2
  REGION 1..12: note = Table B: HLA-DQA1*01:03-B1*06:01L
ARAGEAANFCAL

SEQ ID NO: 25974 - protein, 10 aa, Severe acute respiratory syndrome coronavirus 2
  REGION 1..10: note = Table B: HLA-DQA1*01:03-B1*06:01L
ELGDVRETMS

SEQ ID NO: 25975 - protein, 13 aa, Severe acute respiratory syndrome coronavirus 2
  REGION 1..13: note = Table B: HLA-DQA1*01:03-B1*06:01L
GVQIPCTCGKQAT

SEQ ID NO: 25976 - protein, 13 aa, Severe acute respiratory syndrome coronavirus 2
  REGION 1..13: note = Table B: HLA-DQA1*01:03-B1*06:01L
VQIPCTCGKQATK

SEQ ID NO: 25977 - protein, 12 aa, Severe acute respiratory syndrome coronavirus 2
  REGION 1..12: note = Table B: HLA-DQA1*01:03-B1*06:01L
MMSAPPAQYELK

SEQ ID NO: 25978 - protein, 13 aa, Severe acute respiratory syndrome coronavirus 2
  REGION 1..13: note = Table B: HLA-DQA1*01:03-B1*06:01L
GTFTCASEYTGNY

SEQ ID NO: 25979 - protein, 11 aa, Severe acute respiratory syndrome coronavirus 2
  REGION 1..11: note = Table B: HLA-DQA1*01:03-B1*06:01L
VVCTEIDPKLD

SEQ ID NO: 25980 - protein, 14 aa, Severe acute respiratory syndrome coronavirus 2
  REGION 1..14: note = Table B: HLA-DQA1*01:03-B1*06:01L
IKFADDLNQLTGYK

SEQ ID NO: 25981 - protein, 11 aa, Severe acute respiratory syndrome coronavirus 2
  REGION 1..11: note = Table B: HLA-DQA1*01:03-B1*06:01L
TNKATYKPNTW

SEQ ID NO: 25982 - protein, 10 aa, Severe acute respiratory syndrome coronavirus 2
  REGION 1..10: note = Table B: HLA-DQA1*01:03-B1*06:01L HLA-DQA1*02:01-B1*03:03L
LWSTKPVETS

SEQ ID NO: 25983 - protein, 13 aa, Severe acute respiratory syndrome coronavirus 2
  REGION 1..13: note = Table B: HLA-DQA1*01:03-B1*06:01L HLA-DQA1*02:01-B1*03:03L
PVSEEVVENPTIQ

SEQ ID NO: 25984 - protein, 12 aa, Severe acute respiratory syndrome coronavirus 2
  REGION 1..12: note = Table B: HLA-DQA1*01:03-B1*06:01L
KDVLECNVKTTE

SEQ ID NO: 25985 - protein, 10 aa, Severe acute respiratory syndrome coronavirus 2
  REGION 1..10: note = Table B: HLA-DQA1*01:03-B1*06:01L
LATHGLAAVN

SEQ ID NO: 25986 - protein, 10 aa, Severe acute respiratory syndrome coronavirus 2
  REGION 1..10: note = Table B: HLA-DQA1*01:03-B1*06:01L
TTNIVTRCLN

SEQ ID NO: 25987 - protein, 10 aa, Severe acute respiratory syndrome coronavirus 2
  REGION 1..10: note = Table B: HLA-DQA1*01:03-B1*06:01L
YSTAALGVLM

SEQ ID NO: 25988 - protein, 11 aa, Severe acute respiratory syndrome coronavirus 2
  REGION 1..11: note = Table B: HLA-DQA1*01:03-B1*06:01L
STAALGVLMSN

SEQ ID NO: 25989 - protein, 13 aa, Severe acute respiratory syndrome coronavirus 2
  REGION 1..13: note = Table B: HLA-DQA1*01:03-B1*06:01L
GSIPCSVCLSGLD

SEQ ID NO: 25990 - protein, 15 aa, Severe acute respiratory syndrome coronavirus 2
  REGION 1..15: note = Table B: HLA-DQA1*01:03-B1*06:01L
VDGCNSSTCMMCYKR

SEQ ID NO: 25991 - protein, 10 aa, Severe acute respiratory syndrome coronavirus 2
  REGION 1..10: note = Table B: HLA-DQA1*01:03-B1*06:01L
TTIVNGVRRS

SEQ ID NO: 25992 - protein, 10 aa, Severe acute respiratory syndrome coronavirus 2
  REGION 1..10: note = Table B: HLA-DQA1*01:03-B1*06:01L
VKNGSIHLYF

SEQ ID NO: 25993 - protein, 10 aa, Severe acute respiratory syndrome coronavirus 2
  REGION 1..10: note = Table B: HLA-DQA1*01:03-B1*06:01L HLA-DQA1*02:01-B1*03:03L
NGSIHLYFDK

SEQ ID NO: 25994 - protein, 11 aa, Severe acute respiratory syndrome coronavirus 2
  REGION 1..11: note = Table B: HLA-DQA1*01:03-B1*06:01L
NTKGSLPINVI

SEQ ID NO: 25995 - protein, 14 aa, Severe acute respiratory syndrome coronavirus 2
  REGION 1..14: note = Table B: HLA-DQA1*01:03-B1*06:01L
IVFDGKSKCEESSA

SEQ ID NO: 25996 - protein, 10 aa, Severe acute respiratory syndrome coronavirus 2
  REGION 1..10: note = Table B: HLA-DQA1*01:03-B1*06:01L HLA-DQA1*02:01-B1*03:03L
AKSASVYYSQ

SEQ ID NO: 25997 - protein, 12 aa, Severe acute respiratory syndrome coronavirus 2
  REGION 1..12: note = Table B: HLA-DQA1*01:03-B1*06:01L
MFDAYVNTFSST

SEQ ID NO: 25998 - protein, 10 aa, Severe acute respiratory syndrome coronavirus 2
  REGION 1..10: note = Table B: HLA-DQA1*01:03-B1*06:01L
FNVPMEKLKT

SEQ ID NO: 25999 - protein, 11 aa, Severe acute respiratory syndrome coronavirus 2
  REGION 1..11: note = Table B: HLA-DQA1*01:03-B1*06:01L
GFVDSDVETKD

SEQ ID NO: 26000 - protein, 11 aa, Severe acute respiratory syndrome coronavirus 2
  REGION 1..11: note = Table B: HLA-DQA1*01:03-B1*06:01L
DSDVETKDVVE

SEQ ID NO: 26001 - protein, 11 aa, Severe acute respiratory syndrome coronavirus 2
  REGION 1..11: note = Table B: HLA-DQA1*01:03-B1*06:01L
SHNIALIWNVK

SEQ ID NO: 26002 - protein, 10 aa, Severe acute respiratory syndrome coronavirus 2
  REGION 1..10: note = Table B: HLA-DQA1*01:03-B1*06:01L
KGGKIVNNWL

SEQ ID NO: 26003 - protein, 10 aa, Severe acute respiratory syndrome coronavirus 2
  REGION 1..10: note = Table B: HLA-DQA1*01:03-B1*06:01L HLA-DQA1*02:01-B1*03:03L
FSSEIIGYKA

SEQ ID NO: 26004 - protein, 11 aa, Severe acute respiratory syndrome coronavirus 2
  REGION 1..11: note = Table B: HLA-DQA1*01:03-B1*06:01L
DIASTDTCFAN

SEQ ID NO: 26005 - protein, 11 aa, Severe acute respiratory syndrome coronavirus 2
  REGION 1..11: note = Table B: HLA-DQA1*01:03-B1*06:01L HLA-DQA1*02:01-B1*03:03L
IASTDTCFANK

SEQ ID NO: 26006 - protein, 10 aa, Severe acute respiratory syndrome coronavirus 2
  REGION 1..10: note = Table B: HLA-DQA1*01:03-B1*06:01L
LPGTILRTTN

SEQ ID NO: 26007 - protein, 10 aa, Severe acute respiratory syndrome coronavirus 2
  REGION 1..10: note = Table B: HLA-DQA1*01:03-B1*06:01L HLA-DQA1*02:01-B1*03:03L
TILRTTNGDF

SEQ ID NO: 26008 - protein, 11 aa, Severe acute respiratory syndrome coronavirus 2
  REGION 1..11: note = Table B: HLA-DQA1*01:03-B1*06:01L
YTPSKLIEYTD

SEQ ID NO: 26009 - protein, 10 aa, Severe acute respiratory syndrome coronavirus 2
  REGION 1..10: note = Table B: HLA-DQA1*01:03-B1*06:01L
DTNVLEGSVA

SEQ ID NO: 26010 - protein, 11 aa, Severe acute respiratory syndrome coronavirus 2
  REGION 1..11: note = Table B: HLA-DQA1*01:03-B1*06:01L
LMDGSIIQFPN

SEQ ID NO: 26011 - protein, 14 aa, Severe acute respiratory syndrome coronavirus 2
  REGION 1..14: note = Table B: HLA-DQA1*01:03-B1*06:01L
EYCRHGTCERSEAG

SEQ ID NO: 26012 - protein, 11 aa, Severe acute respiratory syndrome coronavirus 2
  REGION 1..11: note = Table B: HLA-DQA1*01:03-B1*06:01L
VSTSGRWVLNN

SEQ ID NO: 26013 - protein, 11 aa, Severe acute respiratory syndrome coronavirus 2
  REGION 1..11: note = Table B: HLA-DQA1*01:03-B1*06:01L
STSGRWVLNND

SEQ ID NO: 26014 - protein, 11 aa, Severe acute respiratory syndrome coronavirus 2
  REGION 1..11: note = Table B: HLA-DQA1*01:03-B1*06:01L
SGRWVLNNDYY

SEQ ID NO: 26015 - protein, 10 aa, Severe acute respiratory syndrome coronavirus 2
  REGION 1..10: note = Table B: HLA-DQA1*01:03-B1*06:01L
IVAGGIVAIV

SEQ ID NO: 26016 - protein, 11 aa, Severe acute respiratory syndrome coronavirus 2
  REGION 1..11: note = Table B: HLA-DQA1*01:03-B1*06:01L
FNGVSFSTFEE

SEQ ID NO: 26017 - protein, 11 aa, Severe acute respiratory syndrome coronavirus 2
  REGION 1..11: note = Table B: HLA-DQA1*01:03-B1*06:01L
EAACCHLAKAL

SEQ ID NO: 26018 - protein, 12 aa, Severe acute respiratory syndrome coronavirus 2
  REGION 1..12: note = Table B: HLA-DQA1*01:03-B1*06:01L
AACCHLAKALND

SEQ ID NO: 26019 - protein, 12 aa, Severe acute respiratory syndrome coronavirus 2
  REGION 1..12: note = Table B: HLA-DQA1*01:03-B1*06:01L
SNSGSDVLYQPP

SEQ ID NO: 26020 - protein, 10 aa, Severe acute respiratory syndrome coronavirus 2
  REGION 1..10: note = Table B: HLA-DQA1*01:03-B1*06:01L
SITSAVLQSG

SEQ ID NO: 26021 - protein, 11 aa, Severe acute respiratory syndrome coronavirus 2
  REGION 1..11: note = Table B: HLA-DQA1*01:03-B1*06:01L
VEGCMVQVTCG

SEQ ID NO: 26022 - protein, 12 aa, Severe acute respiratory syndrome coronavirus 2
  REGION 1..12: note = Table B: HLA-DQA1*01:03-B1*06:01L
TTTLNGLWLDDV

SEQ ID NO: 26023 - protein, 14 aa, Severe acute respiratory syndrome coronavirus 2
  REGION 1..14: note = Table B: HLA-DQA1*01:03-B1*06:01L
VICTSEDMLNPNYE

SEQ ID NO: 26024 - protein, 12 aa, Severe acute respiratory syndrome coronavirus 2
  REGION 1..12: note = Table B: HLA-DQA1*01:03-B1*06:01L
SEDMLNPNYEDL

SEQ ID NO: 26025 - protein, 15 aa, Severe acute respiratory syndrome coronavirus 2
  REGION 1..15: note = Table B: HLA-DQA1*01:03-B1*06:01L
GHSMQNCVLKLKVDT

SEQ ID NO: 26026 - protein, 11 aa, Severe acute respiratory syndrome coronavirus 2
  REGION 1..11: note = Table B: HLA-DQA1*01:03-B1*06:01L
TANPKTPKYKF

SEQ ID NO: 26027 - protein, 12 aa, Severe acute respiratory syndrome coronavirus 2
  REGION 1..12: note = Table B: HLA-DQA1*01:03-B1*06:01L
PSGVYQCAMRPN

SEQ ID NO: 26028 - protein, 14 aa, Severe acute respiratory syndrome coronavirus 2
  REGION 1..14: note = Table B: HLA-DQA1*01:03-B1*06:01L
FLNGSCGSVGFNID

SEQ ID NO: 26029 - protein, 12 aa, Severe acute respiratory syndrome coronavirus 2
  REGION 1..12: note = Table B: HLA-DQA1*01:03-B1*06:01L HLA-DRB1*04:08L
LPTGVHAGTDLE

SEQ ID NO: 26030 - protein, 12 aa, Severe acute respiratory syndrome coronavirus 2
  REGION 1..12: note = Table B: HLA-DQA1*01:03-B1*06:01L
AGTDTTITVNVL

SEQ ID NO: 26031 - protein, 13 aa, Severe acute respiratory syndrome coronavirus 2
  REGION 1..13: note = Table B: HLA-DQA1*01:03-B1*06:01L
VLDMCASLKELLQ

SEQ ID NO: 26032 - protein, 10 aa, Severe acute respiratory syndrome coronavirus 2
  REGION 1..10: note = Table B: HLA-DQA1*01:03-B1*06:01L
ILGSALLEDE

SEQ ID NO: 26033 - protein, 12 aa, Severe acute respiratory syndrome coronavirus 2
  REGION 1..12: note = Table B: HLA-DQA1*01:03-B1*06:01L
LGSALLEDEFTP

SEQ ID NO: 26034 - protein, 10 aa, Severe acute respiratory syndrome coronavirus 2
  REGION 1..10: note = Table B: HLA-DQA1*01:03-B1*06:01L
SAFAMMFVKH

SEQ ID NO: 26035 - protein, 11 aa, Severe acute respiratory syndrome coronavirus 2
  REGION 1..11: note = Table B: HLA-DQA1*01:03-B1*06:01L
YFNMVYMPASW

SEQ ID NO: 26036 - protein, 11 aa, Severe acute respiratory syndrome coronavirus 2
  REGION 1..11: note = Table B: HLA-DQA1*01:03-B1*06:01L
VDTSLSGFKLK

SEQ ID NO: 26037 - protein, 10 aa, Severe acute respiratory syndrome coronavirus 2
  REGION 1..10: note = Table B: HLA-DQA1*01:03-B1*06:01L
LKDCVMYASA

SEQ ID NO: 26038 - protein, 10 aa, Severe acute respiratory syndrome coronavirus 2
  REGION 1..10: note = Table B: HLA-DQA1*01:03-B1*06:01L
LMTARTVYDD

SEQ ID NO: 26039 - protein, 14 aa, Severe acute respiratory syndrome coronavirus 2
  REGION 1..14: note = Table B: HLA-DQA1*01:03-B1*06:01L
GVGGKPCIKVATVQ

SEQ ID NO: 26040 - protein, 11 aa, Severe acute respiratory syndrome coronavirus 2
  REGION 1..11: note = Table B: HLA-DQA1*01:03-B1*06:01L
SSSKLWAQCVQ

SEQ ID NO: 26041 - protein, 11 aa, Severe acute respiratory syndrome coronavirus 2
  REGION 1..11: note = Table B: HLA-DQA1*01:03-B1*06:01L
NRATLQAIASE

SEQ ID NO: 26042 - protein, 13 aa, Severe acute respiratory syndrome coronavirus 2
  REGION 1..13: note = Table B: HLA-DQA1*01:03-B1*06:01L
SLPSYAAFATAQE

SEQ ID NO: 26043 - protein, 11 aa, Severe acute respiratory syndrome coronavirus 2
  REGION 1..11: note = Table B: HLA-DQA1*01:03-B1*06:01L HLA-DQA1*02:01-B1*03:03L
GDSEVVLKKLK

SEQ ID NO: 26044 - protein, 11 aa, Severe acute respiratory syndrome coronavirus 2
  REGION 1..11: note = Table B: HLA-DQA1*01:03-B1*06:01L
DQAMTQMYKQA

SEQ ID NO: 26045 - protein, 11 aa, Severe acute respiratory syndrome coronavirus 2
  REGION 1..11: note = Table B: HLA-DQA1*01:03-B1*06:01L
QAMTQMYKQAR

SEQ ID NO: 26046 - protein, 14 aa, Severe acute respiratory syndrome coronavirus 2
  REGION 1..14: note = Table B: HLA-DQA1*01:03-B1*06:01L
ARDGCVPLNIIPLT

SEQ ID NO: 26047 - protein, 11 aa, Severe acute respiratory syndrome coronavirus 2
  REGION 1..11: note = Table B: HLA-DQA1*01:03-B1*06:01L
TTAAKLMVVIP

SEQ ID NO: 26048 - protein, 11 aa, Severe acute respiratory syndrome coronavirus 2
  REGION 1..11: note = Table B: HLA-DQA1*01:03-B1*06:01L
TAAKLMVVIPD

SEQ ID NO: 26049 - protein, 12 aa, Severe acute respiratory syndrome coronavirus 2
  REGION 1..12: note = Table B: HLA-DQA1*01:03-B1*06:01L HLA-DRB1*15:03L
IQQVVDADSKIV

SEQ ID NO: 26050 - protein, 12 aa, Severe acute respiratory syndrome coronavirus 2
  REGION 1..12: note = Table B: HLA-DQA1*01:03-B1*06:01L
QNNELSPVALRQ

SEQ ID NO: 26051 - protein, 11 aa, Severe acute respiratory syndrome coronavirus 2
  REGION 1..11: note = Table B: HLA-DQA1*01:03-B1*06:01L
DLKWARFPKSD

SEQ ID NO: 26052 - protein, 12 aa, Severe acute respiratory syndrome coronavirus 2
  REGION 1..12: note = Table B: HLA-DQA1*01:03-B1*06:01L
SDGTGTIYTELE

SEQ ID NO: 26053 - protein, 10 aa, Severe acute respiratory syndrome coronavirus 2
  REGION 1..10: note = Table B: HLA-DQA1*01:03-B1*06:01L
NRGMVLGSLA

SEQ ID NO: 26054 - protein, 11 aa, Severe acute respiratory syndrome coronavirus 2
  REGION 1..11: note = Table B: HLA-DQA1*01:03-B1*06:01L
SFCAFAVDAAK

SEQ ID NO: 26055 - protein, 10 aa, Severe acute respiratory syndrome coronavirus 2
  REGION 1..10: note = Table B: HLA-DQA1*01:03-B1*06:01L HLA-DQA1*02:01-B1*03:03L
THTGTGQAIT

SEQ ID NO: 26056 - protein, 12 aa, Severe acute respiratory syndrome coronavirus 2
  REGION 1..12: note = Table B: HLA-DQA1*01:03-B1*06:01L
HTGTGQAITVTP

SEQ ID NO: 26057 - protein, 13 aa, Severe acute respiratory syndrome coronavirus 2
  REGION 1..13: note = Table B: HLA-DQA1*01:03-B1*06:01L
DQESFGGASCCLY

SEQ ID NO: 26058 - protein, 13 aa, Severe acute respiratory syndrome coronavirus 2
  REGION 1..13: note = Table B: HLA-DQA1*01:03-B1*06:01L
ESFGGASCCLYCR

SEQ ID NO: 26059 - protein, 14 aa, Severe acute respiratory syndrome coronavirus 2
  REGION 1..14: note = Table B: HLA-DQA1*01:03-B1*06:01L
WKGYGCSCDQLREP

SEQ ID NO: 26060 - protein, 11 aa, Severe acute respiratory syndrome coronavirus 2
  REGION 1..11: note = Table B: HLA-DQA1*01:03-B1*06:01L
PMLQSADAQSF

SEQ ID NO: 26061 - protein, 10 aa, Severe acute respiratory syndrome coronavirus 2
  REGION 1..10: note = Table B: HLA-DQA1*01:03-B1*06:01L
LQSADAQSFL

SEQ ID NO: 26062 - protein, 11 aa, Severe acute respiratory syndrome coronavirus 2
  REGION 1..11: note = Table B: HLA-DQA1*01:03-B1*06:01L
DAQSFLNRVCG

SEQ ID NO: 26063 - protein, 12 aa, Severe acute respiratory syndrome coronavirus 2
  REGION 1..12: note = Table B: HLA-DQA1*01:03-B1*06:01L
TDVVYRAFDIYN

SEQ ID NO: 26064 - protein, 15 aa, Severe acute respiratory syndrome coronavirus 2
  REGION 1..15: note = Table B: HLA-DQA1*01:03-B1*06:01L
AKFLKTNCCRFQEKD

SEQ ID NO: 26065 - protein, 14 aa, Severe acute respiratory syndrome coronavirus 2
  REGION 1..14: note = Table B: HLA-DQA1*01:03-B1*06:01L
FLKTNCCRFQEKDE

SEQ ID NO: 26066 - protein, 14 aa, Severe acute respiratory syndrome coronavirus 2
  REGION 1..14: note = Table B: HLA-DQA1*01:03-B1*06:01L
LKTNCCRFQEKDED

SEQ ID NO: 26067 - protein, 14 aa, Severe acute respiratory syndrome coronavirus 2
  REGION 1..14: note = Table B: HLA-DQA1*01:03-B1*06:01L
HEETIYNLLKDCPA

SEQ ID NO: 26068 - protein, 11 aa, Severe acute respiratory syndrome coronavirus 2
  REGION 1..11: note = Table B: HLA-DQA1*01:03-B1*06:01L
DGDMVPHISRQ

SEQ ID NO: 26069 - protein, 11 aa, Severe acute respiratory syndrome coronavirus 2
  REGION 1..11: note = Table B: HLA-DQA1*01:03-B1*06:01L
ANLGERVRQAL

SEQ ID NO: 26070 - protein, 11 aa, Severe acute respiratory syndrome coronavirus 2
  REGION 1..11: note = Table B: HLA-DQA1*01:03-B1*06:01L
MRNAGIVGVLT

SEQ ID NO: 26071 - protein, 13 aa, Severe acute respiratory syndrome coronavirus 2
  REGION 1..13: note = Table B: HLA-DQA1*01:03-B1*06:01L
TLDNQDLNGNWYD

SEQ ID NO: 26072 - protein, 12 aa, Severe acute respiratory syndrome coronavirus 2
  REGION 1..12: note = Table B: HLA-DQA1*01:03-B1*06:01L
PGSGVPVVDSYY

SEQ ID NO: 26073 - protein, 11 aa, Severe acute respiratory syndrome coronavirus 2
  REGION 1..11: note = Table B: HLA-DQA1*01:03-B1*06:01L
KYDFTEERLKL

SEQ ID NO: 26074 - protein, 10 aa, Severe acute respiratory syndrome coronavirus 2
  REGION 1..10: note = Table B: HLA-DQA1*01:03-B1*06:01L
SFGPLVRKIF

SEQ ID NO: 26075 - protein, 11 aa, Severe acute respiratory syndrome coronavirus 2
  REGION 1..11: note = Table B: HLA-DQA1*01:03-B1*06:01L
VVSTGYHFREL

SEQ ID NO: 26076 - protein, 11 aa, Severe acute respiratory syndrome coronavirus 2
  REGION 1..11: note = Table B: HLA-DQA1*01:03-B1*06:01L
VSTGYHFRELG

SEQ ID NO: 26077 - protein, 12 aa, Severe acute respiratory syndrome coronavirus 2
  REGION 1..12: note = Table B: HLA-DQA1*01:03-B1*06:01L HLA-DQA1*02:01-B1*03:03L
EDQDALFAYTKR

SEQ ID NO: 26078 - protein, 12 aa, Severe acute respiratory syndrome coronavirus 2
  REGION 1..12: note = Table B: HLA-DQA1*01:03-B1*06:01L HLA-DQA1*02:01-B1*03:03L
ITQMNLKYAISA

SEQ ID NO: 26079 - protein, 12 aa, Severe acute respiratory syndrome coronavirus 2
  REGION 1..12: note = Table B: HLA-DQA1*01:03-B1*06:01L
RTVAGVSICSTM

SEQ ID NO: 26080 - protein, 12 aa, Severe acute respiratory syndrome coronavirus 2
  REGION 1..12: note = Table B: HLA-DQA1*01:03-B1*06:01L
SICSTMTNRQFH

SEQ ID NO: 26081 - protein, 12 aa, Severe acute respiratory syndrome coronavirus 2
  REGION 1..12: note = Table B: HLA-DQA1*01:03-B1*06:01L
ICSTMTNRQFHQ

SEQ ID NO: 26082 - protein, 10 aa, Severe acute respiratory syndrome coronavirus 2
  REGION 1..10: note = Table B: HLA-DQA1*01:03-B1*06:01L HLA-DQA1*02:01-B1*03:03L
RGATVVIGTS

SEQ ID NO: 26083 - protein, 15 aa, Severe acute respiratory syndrome coronavirus 2
  REGION 1..15: note = Table B: HLA-DQA1*01:03-B1*06:01L
NPHLMGWDYPKCDRA

SEQ ID NO: 26084 - protein, 15 aa, Severe acute respiratory syndrome coronavirus 2
  REGION 1..15: note = Table B: HLA-DQA1*01:03-B1*06:01L
KPGGTSSGDATTAYA

SEQ ID NO: 26085 - protein, 11 aa, Severe acute respiratory syndrome coronavirus 2
  REGION 1..11: note = Table B: HLA-DQA1*01:03-B1*06:01L
TDFVNEFYAYL

SEQ ID NO: 26086 - protein, 12 aa, Severe acute respiratory syndrome coronavirus 2
  REGION 1..12: note = Table B: HLA-DQA1*01:03-B1*06:01L
DDAVVCFNSTYA

SEQ ID NO: 26087 - protein, 10 aa, Severe acute respiratory syndrome coronavirus 2
  REGION 1..10: note = Table B: HLA-DQA1*01:03-B1*06:01L HLA-DQA1*02:01-B1*03:03L
QNNVFMSEAK

SEQ ID NO: 26088 - protein, 11 aa, Severe acute respiratory syndrome coronavirus 2
  REGION 1..11: note = Table B: HLA-DQA1*01:03-B1*06:01L
DYVYLPYPDPS

SEQ ID NO: 26089 - protein, 17 aa, Severe acute respiratory syndrome coronavirus 2
  REGION 1..17: note = Table B: HLA-DQA1*01:03-B1*06:01L
PDPSRILGAGCFVDDIV

SEQ ID NO: 26090 - protein, 10 aa, Severe acute respiratory syndrome coronavirus 2
  REGION 1..10: note = Table B: HLA-DQA1*01:03-B1*06:01L
DGTLMIERFV

SEQ ID NO: 26091 - protein, 10 aa, Severe acute respiratory syndrome coronavirus 2
  REGION 1..10: note = Table B: HLA-DQA1*01:03-B1*06:01L
GTLMIERFVS

SEQ ID NO: 26092 - protein, 11 aa, Severe acute respiratory syndrome coronavirus 2
  REGION 1..11: note = Table B: HLA-DQA1*01:03-B1*06:01L
TGHMLDMYSVM

SEQ ID NO: 26093 - protein, 11 aa, Severe acute respiratory syndrome coronavirus 2
  REGION 1..11: note = Table B: HLA-DQA1*01:03-B1*06:01L
DNTSRYWEPEF

SEQ ID NO: 26094 - protein, 13 aa, Severe acute respiratory syndrome coronavirus 2
  REGION 1..13: note = Table B: HLA-DQA1*01:03-B1*06:01L
LQAVGACVLCNSQ

SEQ ID NO: 26095 - protein, 12 aa, Severe acute respiratory syndrome coronavirus 2
  REGION 1..12: note = Table B: HLA-DQA1*01:03-B1*06:01L
AVGACVLCNSQT

SEQ ID NO: 26096 - protein, 12 aa, Severe acute respiratory syndrome coronavirus 2
  REGION 1..12: note = Table B: HLA-DQA1*01:03-B1*06:01L
VGACVLCNSQTS

SEQ ID NO: 26097 - protein, 11 aa, Severe acute respiratory syndrome coronavirus 2
  REGION 1..11: note = Table B: HLA-DQA1*01:03-B1*06:01L
YDHVISTSHKL

SEQ ID NO: 26098 - protein, 14 aa, Severe acute respiratory syndrome coronavirus 2
  REGION 1..14: note = Table B: HLA-DQA1*01:03-B1*06:01L
ISTSHKLVLSVNPY

SEQ ID NO: 26099 - protein, 12 aa, Severe acute respiratory syndrome coronavirus 2
  REGION 1..12: note = Table B: HLA-DQA1*01:03-B1*06:01L HLA-DQA1*02:01-B1*03:03L
DVTDVTQLYLGG

SEQ ID NO: 26100 - protein, 15 aa, Severe acute respiratory syndrome coronavirus 2
  REGION 1..15: note = Table B: HLA-DQA1*01:03-B1*06:01L
GLYKNTCVGSDNVTD

SEQ ID NO: 26101 - protein, 12 aa, Severe acute respiratory syndrome coronavirus 2
  REGION 1..12: note = Table B: HLA-DQA1*01:03-B1*06:01L
AIATCDWTNAGD

SEQ ID NO: 26102 - protein, 12 aa, Severe acute respiratory syndrome coronavirus 2
  REGION 1..12: note = Table B: HLA-DQA1*01:03-B1*06:01L
DWTNAGDYILAN

SEQ ID NO: 26103 - protein, 11 aa, Severe acute respiratory syndrome coronavirus 2
  REGION 1..11: note = Table B: HLA-DQA1*01:03-B1*06:01L
TNAGDYILANT

SEQ ID NO: 26104 - protein, 13 aa, Severe acute respiratory syndrome coronavirus 2
  REGION 1..13: note = Table B: HLA-DQA1*01:03-B1*06:01L
LKATEETFKLSYG

SEQ ID NO: 26105 - protein, 13 aa, Severe acute respiratory syndrome coronavirus 2
  REGION 1..13: note = Table B: HLA-DQA1*01:03-B1*06:01L
YRVTKNSKVQIGE

SEQ ID NO: 26106 - protein, 11 aa, Severe acute respiratory syndrome coronavirus 2
  REGION 1..11: note = Table B: HLA-DQA1*01:03-B1*06:01L
NVGDYFVLTSH

SEQ ID NO: 26107 - protein, 11 aa, Severe acute respiratory syndrome coronavirus 2
  REGION 1..11: note = Table B: HLA-DQA1*01:03-B1*06:01L
TSHTVMPLSAP

SEQ ID NO: 26108 - protein, 11 aa, Severe acute respiratory syndrome coronavirus 2
  REGION 1..11: note = Table B: HLA-DQA1*01:03-B1*06:01L
LYPTLNISDEF

SEQ ID NO: 26109 - protein, 10 aa, Severe acute respiratory syndrome coronavirus 2
  REGION 1..10: note = Table B: HLA-DQA1*01:03-B1*06:01L
GTGKSHFAIG

SEQ ID NO: 26110 - protein, 13 aa, Severe acute respiratory syndrome coronavirus 2
  REGION 1..13: note = Table B: HLA-DQA1*01:03-B1*06:01L
SHAAVDALCEKAL

SEQ ID NO: 26111 - protein, 12 aa, Severe acute respiratory syndrome coronavirus 2
  REGION 1..12: note = Table B: HLA-DQA1*01:03-B1*06:01L HLA-DRB1*15:03L
AVDALCEKALKY

SEQ ID NO: 26112 - protein, 11 aa, Severe acute respiratory syndrome coronavirus 2
  REGION 1..11: note = Table B: HLA-DQA1*01:03-B1*06:01L
PETTADIVVFD

SEQ ID NO: 26113 - protein, 10 aa, Severe acute respiratory syndrome coronavirus 2
  REGION 1..10: note = Table B: HLA-DQA1*01:03-B1*06:01L
TTADIVVFDE

SEQ ID NO: 26114 - protein, 10 aa, Severe acute respiratory syndrome coronavirus 2
  REGION 1..10: note = Table B: HLA-DQA1*01:03-B1*06:01L
DTVSALVYDN

SEQ ID NO: 26115 - protein, 14 aa, Severe acute respiratory syndrome coronavirus 2
  REGION 1..14: note = Table B: HLA-DQA1*01:03-B1*06:01L
AHKDKSAQCFKMFY

SEQ ID NO: 26116 - protein, 12 aa, Severe acute respiratory syndrome coronavirus 2
  REGION 1..12: note = Table B: HLA-DQA1*01:03-B1*06:01L
QNAVASKILGLP

SEQ ID NO: 26117 - protein, 10 aa, Severe acute respiratory syndrome coronavirus 2
  REGION 1..10: note = Table B: HLA-DQA1*01:03-B1*06:01L
VASKILGLPT

SEQ ID NO: 26118 - protein, 14 aa, Severe acute respiratory syndrome coronavirus 2
  REGION 1..14: note = Table B: HLA-DQA1*01:03-B1*06:01L
DSSQGSEYDYVIFT

SEQ ID NO: 26119 - protein, 11 aa, Severe acute respiratory syndrome coronavirus 2
  REGION 1..11: note = Table B: HLA-DQA1*01:03-B1*06:01L
TQTTETAHSCN

SEQ ID NO: 26120 - protein, 10 aa, Severe acute respiratory syndrome coronavirus 2
  REGION 1..10: note = Table B: HLA-DQA1*01:03-B1*06:01L
TETAHSCNVN

SEQ ID NO: 26121 - protein, 10 aa, Severe acute respiratory syndrome coronavirus 2
  REGION 1..10: note = Table B: HLA-DQA1*01:03-B1*06:01L
NVTGLFKDCS

SEQ ID NO: 26122 - protein, 14 aa, Severe acute respiratory syndrome coronavirus 2
  REGION 1..14: note = Table B: HLA-DQA1*01:03-B1*06:01L
KTEGLCVDIPGIPK

SEQ ID NO: 26123 - protein, 11 aa, Severe acute respiratory syndrome coronavirus 2
  REGION 1..11: note = Table B: HLA-DQA1*01:03-B1*06:01L HLA-DQA1*02:01-B1*03:03L
VDIPGIPKDMT

SEQ ID NO: 26124 - protein, 12 aa, Severe acute respiratory syndrome coronavirus 2
  REGION 1..12: note = Table B: HLA-DQA1*01:03-B1*06:01L
DIPGIPKDMTYR

SEQ ID NO: 26125 - protein, 13 aa, Severe acute respiratory syndrome coronavirus 2
  REGION 1..13: note = Table B: HLA-DQA1*01:03-B1*06:01L
MFITREEAIRHVR

SEQ ID NO: 26126 - protein, 10 aa, Severe acute respiratory syndrome coronavirus 2
  REGION 1..10: note = Table B: HLA-DQA1*01:03-B1*06:01L
VEGCHATREA

SEQ ID NO: 26127 - protein, 11 aa, Severe acute respiratory syndrome coronavirus 2
  REGION 1..11: note = Table B: HLA-DQA1*01:03-B1*06:01L
FSTGVNLVAVP

SEQ ID NO: 26128 - protein, 10 aa, Severe acute respiratory syndrome coronavirus 2
  REGION 1..10: note = Table B: HLA-DQA1*01:03-B1*06:01L
MYKGLPWNVV

SEQ ID NO: 26129 - protein, 11 aa, Severe acute respiratory syndrome coronavirus 2
  REGION 1..11: note = Table B: HLA-DQA1*01:03-B1*06:01L
LSDTLKNLSDR

SEQ ID NO: 26130 - protein, 13 aa, Severe acute respiratory syndrome coronavirus 2
  REGION 1..13: note = Table B: HLA-DQA1*01:03-B1*06:01L
LSDRVVFVLWAHG

SEQ ID NO: 26131 - protein, 11 aa, Severe acute respiratory syndrome coronavirus 2
  REGION 1..11: note = Table B: HLA-DQA1*01:03-B1*06:01L
STASDTYACWH

SEQ ID NO: 26132 - protein, 13 aa, Severe acute respiratory syndrome coronavirus 2
  REGION 1..13: note = Table B: HLA-DQA1*01:03-B1*06:01L HLA-DQA1*02:01-B1*03:03L
DIGNPKAIKCVPQ

SEQ ID NO: 26133 - protein, 10 aa, Severe acute respiratory syndrome coronavirus 2
  REGION 1..10: note = Table B: HLA-DQA1*01:03-B1*06:01L
SAGFSLWVYK

SEQ ID NO: 26134 - protein, 15 aa, Severe acute respiratory syndrome coronavirus 2
  REGION 1..15: note = Table B: HLA-DQA1*01:03-B1*06:01L
VVNKGHFDGQQGEVP

SEQ ID NO: 26135 - protein, 12 aa, Severe acute respiratory syndrome coronavirus 2
  REGION 1..12: note = Table B: HLA-DQA1*01:03-B1*06:01L
QQGEVPVSIINN

SEQ ID NO: 26136 - protein, 11 aa, Severe acute respiratory syndrome coronavirus 2
  REGION 1..11: note = Table B: HLA-DQA1*01:03-B1*06:01L HLA-DQA1*02:01-B1*03:03L
DGVDVELFENK

SEQ ID NO: 26137 - protein, 14 aa, Severe acute respiratory syndrome coronavirus 2
  REGION 1..14: note = Table B: HLA-DQA1*01:03-B1*06:01L HLA-DRB1*08:02L
IWDYKRDAPAHIST

SEQ ID NO: 26138 - protein, 15 aa, Severe acute respiratory syndrome coronavirus 2
  REGION 1..15: note = Table B: HLA-DQA1*01:03-B1*06:01L
VDLFRNARNGVLITE

SEQ ID NO: 26139 - protein, 12 aa, Severe acute respiratory syndrome coronavirus 2
  REGION 1..12: note = Table B: HLA-DQA1*01:03-B1*06:01L
NARNGVLITEGS

SEQ ID NO: 26140 - protein, 12 aa, Severe acute respiratory syndrome coronavirus 2
  REGION 1..12: note = Table B: HLA-DQA1*01:03-B1*06:01L
ARNGVLITEGSV

SEQ ID NO: 26141 - protein, 14 aa, Severe acute respiratory syndrome coronavirus 2
  REGION 1..14: note = Table B: HLA-DQA1*01:03-B1*06:01L
LQPSVGPKQASLNG

SEQ ID NO: 26142 - protein, 12 aa, Severe acute respiratory syndrome coronavirus 2
  REGION 1..12: note = Table B: HLA-DQA1*01:03-B1*06:01L
KVDGVVQQLPET

SEQ ID NO: 26143 - protein, 12 aa, Severe acute respiratory syndrome coronavirus 2
  REGION 1..12: note = Table B: HLA-DQA1*01:03-B1*06:01L
QLPETYFTQSRN

SEQ ID NO: 26144 - protein, 11 aa, Severe acute respiratory syndrome coronavirus 2
  REGION 1..11: note = Table B: HLA-DQA1*01:03-B1*06:01L
SQLGGLHLLIG

SEQ ID NO: 26145 - protein, 13 aa, Severe acute respiratory syndrome coronavirus 2
  REGION 1..13: note = Table B: HLA-DQA1*01:03-B1*06:01L
TVKNYFITDAQTG

SEQ ID NO: 26146 - protein, 10 aa, Severe acute respiratory syndrome coronavirus 2
  REGION 1..10: note = Table B: HLA-DQA1*01:03-B1*06:01L
DDFVEIIKSQ

SEQ ID NO: 26147 - protein, 11 aa, Severe acute respiratory syndrome coronavirus 2
  REGION 1..11: note = Table B: HLA-DQA1*01:03-B1*06:01L
IKSQDLSVVSK

SEQ ID NO: 26148 - protein, 10 aa, Severe acute respiratory syndrome coronavirus 2
  REGION 1..10: note = Table B: HLA-DQA1*01:03-B1*06:01L
PKGIMMNVAK

SEQ ID NO: 26149 - protein, 13 aa, Severe acute respiratory syndrome coronavirus 2
  REGION 1..13: note = Table B: HLA-DQA1*01:03-B1*06:01L
KYTQLCQYLNTLT

SEQ ID NO: 26150 - protein, 12 aa, Severe acute respiratory syndrome coronavirus 2
  REGION 1..12: note = Table B: HLA-DQA1*01:03-B1*06:01L
APGTAVLRQWLP

SEQ ID NO: 26151 - protein, 12 aa, Severe acute respiratory syndrome coronavirus 2
  REGION 1..12: note = Table B: HLA-DQA1*01:03-B1*06:01L
GTAVLRQWLPTG

SEQ ID NO: 26152 - protein, 10 aa, Severe acute respiratory syndrome coronavirus 2
  REGION 1..10: note = Table B: HLA-DQA1*01:03-B1*06:01L
PTGTLLVDSD

SEQ ID NO: 26153 - protein, 13 aa, Severe acute respiratory syndrome coronavirus 2
  REGION 1..13: note = Table B: HLA-DQA1*01:03-B1*06:01L
VSDADSTLIGDCA

SEQ ID NO: 26154 - protein, 12 aa, Severe acute respiratory syndrome coronavirus 2
  REGION 1..12: note = Table B: HLA-DQA1*01:03-B1*06:01L
DADSTLIGDCAT

SEQ ID NO: 26155 - protein, 10 aa, Severe acute respiratory syndrome coronavirus 2
  REGION 1..10: note = Table B: HLA-DQA1*01:03-B1*06:01L
DCATVHTANK

SEQ ID NO: 26156 - protein, 12 aa, Severe acute respiratory syndrome coronavirus 2
  REGION 1..12: note = Table B: HLA-DQA1*01:03-B1*06:01L
VHTANKWDLIIS

SEQ ID NO: 26157 - protein, 12 aa, Severe acute respiratory syndrome coronavirus 2
  REGION 1..12: note = Table B: HLA-DQA1*01:03-B1*06:01L
VTKENDSKEGFF

SEQ ID NO: 26158 - protein, 10 aa, Severe acute respiratory syndrome coronavirus 2
  REGION 1..10: note = Table B: HLA-DQA1*01:03-B1*06:01L
ICGFIQQKLA

SEQ ID NO: 26159 - protein, 13 aa, Severe acute respiratory syndrome coronavirus 2
  REGION 1..13: note = Table B: HLA-DQA1*01:03-B1*06:01L
QQKLALGGSVAIK

SEQ ID NO: 26160 - protein, 11 aa, Severe acute respiratory syndrome coronavirus 2
  REGION 1..11: note = Table B: HLA-DQA1*01:03-B1*06:01L
NASSSEAFLIG

SEQ ID NO: 26161 - protein, 12 aa, Severe acute respiratory syndrome coronavirus 2
  REGION 1..12: note = Table B: HLA-DQA1*01:03-B1*06:01L
ASSSEAFLIGCN

SEQ ID NO: 26162 - protein, 15 aa, Severe acute respiratory syndrome coronavirus 2
  REGION 1..15: note = Table B: HLA-DQA1*01:03-B1*06:01L
SSEAFLIGCNYLGKP

SEQ ID NO: 26163 - protein, 14 aa, Severe acute respiratory syndrome coronavirus 2
  REGION 1..14: note = Table B: HLA-DQA1*01:03-B1*06:01L HLA-DRB1*15:03L
FLIGCNYLGKPREQ

SEQ ID NO: 26164 - protein, 14 aa, Severe acute respiratory syndrome coronavirus 2
  REGION 1..14: note = Table B: HLA-DQA1*01:03-B1*06:01L
TRGVYYPDKVFRSS

SEQ ID NO: 26165 - protein, 10 aa, Severe acute respiratory syndrome coronavirus 2
  REGION 1..10: note = Table B: HLA-DQA1*01:03-B1*06:01L
KRFDNPVLPF

SEQ ID NO: 26166 - protein, 13 aa, Severe acute respiratory syndrome coronavirus 2
  REGION 1..13: note = Table B: HLA-DQA1*01:03-B1*06:01L
LPFNDGVYFASTE

SEQ ID NO: 26167 - protein, 11 aa, Severe acute respiratory syndrome coronavirus 2
  REGION 1..11: note = Table B: HLA-DQA1*01:03-B1*06:01L
NDGVYFASTEK

SEQ ID NO: 26168 - protein, 10 aa, Severe acute respiratory syndrome coronavirus 2
  REGION 1..10: note = Table B: HLA-DQA1*01:03-B1*06:01L
ATNVVIKVCE

SEQ ID NO: 26169 - protein, 13 aa, Severe acute respiratory syndrome coronavirus 2
  REGION 1..13: note = Table B: HLA-DQA1*01:03-B1*06:01L
WMESEFRVYSSAN

SEQ ID NO: 26170 - protein, 12 aa, Severe acute respiratory syndrome coronavirus 2
  REGION 1..12: note = Table B: HLA-DQA1*01:03-B1*06:01L
ANNCTFEYVSQP

SEQ ID NO: 26171 - protein, 11 aa, Severe acute respiratory syndrome coronavirus 2
  REGION 1..11: note = Table B: HLA-DQA1*01:03-B1*06:01L
FQTLLALHRSY

SEQ ID NO: 26172 - protein, 13 aa, Severe acute respiratory syndrome coronavirus 2
  REGION 1..13: note = Table B: HLA-DQA1*01:03-B1*06:01L
SSGWTAGAAAYYV

SEQ ID NO: 26173 - protein, 10 aa, Severe acute respiratory syndrome coronavirus 2
  REGION 1..10: note = Table B: HLA-DQA1*01:03-B1*06:01L
TAGAAAYYVG

SEQ ID NO: 26174 - protein, 11 aa, Severe acute respiratory syndrome coronavirus 2
  REGION 1..11: note = Table B: HLA-DQA1*01:03-B1*06:01L
ISNCVADYSVL

SEQ ID NO: 26175 - protein, 10 aa, Severe acute respiratory syndrome coronavirus 2
  REGION 1..10: note = Table B: HLA-DQA1*01:03-B1*06:01L HLA-DQA1*02:01-B1*03:03L
GQTGKIADYN

SEQ ID NO: 26176 - protein, 10 aa, Severe acute respiratory syndrome coronavirus 2
  REGION 1..10: note = Table B: HLA-DQA1*01:03-B1*06:01L
TGCVIAWNSN

SEQ ID NO: 26177 - protein, 12 aa, Severe acute respiratory syndrome coronavirus 2
  REGION 1..12: note = Table B: HLA-DQA1*01:03-B1*06:01L
DISTEIYQAGST

SEQ ID NO: 26178 - protein, 11 aa, Severe acute respiratory syndrome coronavirus 2
  REGION 1..11: note = Table B: HLA-DQA1*01:03-B1*06:01L
NCYFPLQSYGF

SEQ ID NO: 26179 - protein, 10 aa, Severe acute respiratory syndrome coronavirus 2
  REGION 1..10: note = Table B: HLA-DQA1*01:03-B1*06:01L HLA-DQA1*02:01-B1*03:03L
TGTGVLTESN

SEQ ID NO: 26180 - protein, 11 aa, Severe acute respiratory syndrome coronavirus 2
  REGION 1..11: note = Table B: HLA-DQA1*01:03-B1*06:01L
DITPCSFGGVS

SEQ ID NO: 26181 - protein, 12 aa, Severe acute respiratory syndrome coronavirus 2
  REGION 1..12: note = Table B: HLA-DQA1*01:03-B1*06:01L
TNTSNQVAVLYQ

SEQ ID NO: 26182 - protein, 12 aa, Severe acute respiratory syndrome coronavirus 2
  REGION 1..12: note = Table B: HLA-DQA1*01:03-B1*06:01L
TSNQVAVLYQDV

SEQ ID NO: 26183 - protein, 10 aa, Severe acute respiratory syndrome coronavirus 2
  REGION 1..10: note = Table B: HLA-DQA1*01:03-B1*06:01L
NCTEVPVAIH

SEQ ID NO: 26184 - protein, 11 aa, Severe acute respiratory syndrome coronavirus 2
  REGION 1..11: note = Table B: HLA-DQA1*01:03-B1*06:01L
AGCLIGAEHVN

SEQ ID NO: 26185 - protein, 12 aa, Severe acute respiratory syndrome coronavirus 2
  REGION 1..12: note = Table B: HLA-DQA1*01:03-B1*06:01L
IGAGICASYQTQ

SEQ ID NO: 26186 - protein, 11 aa, Severe acute respiratory syndrome coronavirus 2
  REGION 1..11: note = Table B: HLA-DQA1*01:03-B1*06:01L
VASQSIIAYTM

SEQ ID NO: 26187 - protein, 12 aa, Severe acute respiratory syndrome coronavirus 2
  REGION 1..12: note = Table B: HLA-DQA1*01:03-B1*06:01L
STECSNLLLQYG

SEQ ID NO: 26188 - protein, 10 aa, Severe acute respiratory syndrome coronavirus 2
  REGION 1..10: note = Table B: HLA-DQA1*01:03-B1*06:01L
FCTQLNRALT

SEQ ID NO: 26189 - protein, 17 aa, Severe acute respiratory syndrome coronavirus 2
  REGION 1..17: note = Table B: HLA-DQA1*01:03-B1*06:01L
LPDPSKPSKRSFIEDLL

SEQ ID NO: 26190 - protein, 11 aa, Severe acute respiratory syndrome coronavirus 2
  REGION 1..11: note = Table B: HLA-DQA1*01:03-B1*06:01L
TLADAGFIKQY

SEQ ID NO: 26191 - protein, 13 aa, Severe acute respiratory syndrome coronavirus 2
  REGION 1..13: note = Table B: HLA-DQA1*01:03-B1*06:01L
LTDEMIAQYTSAL

SEQ ID NO: 26192 - protein, 10 aa, Severe acute respiratory syndrome coronavirus 2
  REGION 1..10: note = Table B: HLA-DQA1*01:03-B1*06:01L
TSALLAGTIT

SEQ ID NO: 26193 - protein, 10 aa, Severe acute respiratory syndrome coronavirus 2
  REGION 1..10: note = Table B: HLA-DQA1*01:03-B1*06:01L
ITSGWTFGAG

SEQ ID NO: 26194 - protein, 13 aa, Severe acute respiratory syndrome coronavirus 2
  REGION 1..13: note = Table B: HLA-DQA1*01:03-B1*06:01L
TSGWTFGAGAALQ

SEQ ID NO: 26195 - protein, 12 aa, Severe acute respiratory syndrome coronavirus 2
  REGION 1..12: note = Table B: HLA-DQA1*01:03-B1*06:01L
LSSNFGAISSVL

SEQ ID NO: 26196 - protein, 10 aa, Severe acute respiratory syndrome coronavirus 2
  REGION 1..10: note = Table B: HLA-DQA1*01:03-B1*06:01L
LAATKMSECV

SEQ ID NO: 26197 - protein, 10 aa, Severe acute respiratory syndrome coronavirus 2
  REGION 1..10: note = Table B: HLA-DQA1*01:03-B1*06:01L
NFTTAPAICH

SEQ ID NO: 26198 - protein, 10 aa, Severe acute respiratory syndrome coronavirus 2
  REGION 1..10: note = Table B: HLA-DQA1*01:03-B1*06:01L
TAPAICHDGK

SEQ ID NO: 26199 - protein, 13 aa, Severe acute respiratory syndrome coronavirus 2
  REGION 1..13: note = Table B: HLA-DQA1*01:03-B1*06:01L
TQRNFYEPQIITT

SEQ ID NO: 26200 - protein, 10 aa, Severe acute respiratory syndrome coronavirus 2
  REGION 1..10: note = Table B: HLA-DQA1*01:03-B1*06:01L
PQIITTDNTF

SEQ ID NO: 26201 - protein, 14 aa, Severe acute respiratory syndrome coronavirus 2
  REGION 1..14: note = Table B: HLA-DQA1*01:03-B1*06:01L
IITTDNTFVSGNCD

SEQ ID NO: 26202 - protein, 12 aa, Severe acute respiratory syndrome coronavirus 2
  REGION 1..12: note = Table B: HLA-DQA1*01:03-B1*06:01L
EDDSEPVLKGVK

SEQ ID NO: 26203 - protein, 12 aa, Severe acute respiratory syndrome coronavirus 2
  REGION 1..12: note = Table B: HLA-DQA1*01:03-B1*06:01L
VTLKQGEIKDAT

SEQ ID NO: 26204 - protein, 11 aa, Severe acute respiratory syndrome coronavirus 2
  REGION 1..11: note = Table B: HLA-DQA1*01:03-B1*06:01L
LKQGEIKDATP

SEQ ID NO: 26205 - protein, 12 aa, Severe acute respiratory syndrome coronavirus 2
  REGION 1..12: note = Table B: HLA-DQA1*01:03-B1*06:01L
TATIPIQASLPF

SEQ ID NO: 26206 - protein, 10 aa, Severe acute respiratory syndrome coronavirus 2
  REGION 1..10: note = Table B: HLA-DQA1*01:03-B1*06:01L
QSINFVRIIM

SEQ ID NO: 26207 - protein, 11 aa, Severe acute respiratory syndrome coronavirus 2
  REGION 1..11: note = Table B: HLA-DQA1*01:03-B1*06:01L
SVTSSIVITSG

SEQ ID NO: 26208 - protein, 13 aa, Severe acute respiratory syndrome coronavirus 2
  REGION 1..13: note = Table B: HLA-DQA1*01:03-B1*06:01L
YYQLYSTQLSTDT

SEQ ID NO: 26209 - protein, 10 aa, Severe acute respiratory syndrome coronavirus 2
  REGION 1..10: note = Table B: HLA-DQA1*01:03-B1*06:01L HLA-DQA1*02:01-B1*03:03L
SGVVNPVMEP

SEQ ID NO: 26210 - protein, 11 aa, Severe acute respiratory syndrome coronavirus 2
  REGION 1..11: note = Table B: HLA-DQA1*01:03-B1*06:01L
LGASQRVAGDS

SEQ ID NO: 26211 - protein, 14 aa, Severe acute respiratory syndrome coronavirus 2
  REGION 1..14: note = Table B: HLA-DQA1*01:03-B1*06:01L HLA-DRB1*15:01L
IGNYKLNTDHSSSS

SEQ ID NO: 26212 - protein, 12 aa, Severe acute respiratory syndrome coronavirus 2
  REGION 1..12: note = Table B: HLA-DQA1*01:03-B1*06:01L
DHSSSSDNIALL

SEQ ID NO: 26213 - protein, 13 aa, Severe acute respiratory syndrome coronavirus 2
  REGION 1..13: note = Table B: HLA-DQA1*01:03-B1*06:01L
HSSSSDNIALLVQ

SEQ ID NO: 26214 - protein, 10 aa, Severe acute respiratory syndrome coronavirus 2
  REGION 1..10: note = Table B: HLA-DQA1*01:03-B1*06:01L
ATCELYHYQE

SEQ ID NO: 26215 - protein, 10 aa, Severe acute respiratory syndrome coronavirus 2
  REGION 1..10: note = Table B: HLA-DQA1*01:03-B1*06:01L
FAFACPDGVK

SEQ ID NO: 26216 - protein, 11 aa, Severe acute respiratory syndrome coronavirus 2
  REGION 1..11: note = Table B: HLA-DQA1*01:03-B1*06:01L
GNYTVSCLPFT

SEQ ID NO: 26217 - protein, 11 aa, Severe acute respiratory syndrome coronavirus 2
  REGION 1..11: note = Table B: HLA-DQA1*01:03-B1*06:01L
PNNTASWFTAL

SEQ ID NO: 26218 - protein, 10 aa, Severe acute respiratory syndrome coronavirus 2
  REGION 1..10: note = Table B: HLA-DQA1*01:03-B1*06:01L
NTASWFTALT

SEQ ID NO: 26219 - protein, 14 aa, Severe acute respiratory syndrome coronavirus 2
  REGION 1..14: note = Table B: HLA-DQA1*01:03-B1*06:01L
NTNSSPDDQIGYYR

SEQ ID NO: 26220 - protein, 11 aa, Severe acute respiratory syndrome coronavirus 2
  REGION 1..11: note = Table B: HLA-DQA1*01:03-B1*06:01L
NKDGIIWVATE

SEQ ID NO: 26221 - protein, 11 aa, Severe acute respiratory syndrome coronavirus 2
  REGION 1..11: note = Table B: HLA-DQA1*01:03-B1*06:01L
NNAAIVLQLPQ

SEQ ID NO: 26222 - protein, 11 aa, Severe acute respiratory syndrome coronavirus 2
  REGION 1..11: note = Table B: HLA-DQA1*01:03-B1*06:01L
NAAIVLQLPQG

SEQ ID NO: 26223 - protein, 15 aa, Severe acute respiratory syndrome coronavirus 2
  REGION 1..15: note = Table B: HLA-DQA1*01:03-B1*06:01L
SRNSSRNSTPGSSRG

SEQ ID NO: 26224 - protein, 14 aa, Severe acute respiratory syndrome coronavirus 2
  REGION 1..14: note = Table B: HLA-DQA1*01:03-B1*06:01L
QQQGQTVTKKSAAE

SEQ ID NO: 26225 - protein, 13 aa, Severe acute respiratory syndrome coronavirus 2
  REGION 1..13: note = Table B: HLA-DQA1*01:03-B1*06:01L
EVTPSGTWLTYTG

SEQ ID NO: 26226 - protein, 13 aa, Severe acute respiratory syndrome coronavirus 2
  REGION 1..13: note = Table B: HLA-DQA1*01:03-B1*06:01L
VTPSGTWLTYTGA

SEQ ID NO: 26227 - protein, 10 aa, Severe acute respiratory syndrome coronavirus 2
  REGION 1..10: note = Table B: HLA-DQA1*01:03-B1*06:01L HLA-DQA1*02:01-B1*03:03L
TYTGAIKLDD

SEQ ID NO: 26228 - protein, 14 aa, Severe acute respiratory syndrome coronavirus 2
  REGION 1..14: note = Table B: HLA-DRB1*04:08L
KTHVQLSLPVLQVR

SEQ ID NO: 26229 - protein, 14 aa, Severe acute respiratory syndrome coronavirus 2
  REGION 1..14: note = Table B: HLA-DRB1*04:08L
VELVAELEGIQYGR

SEQ ID NO: 26230 - protein, 12 aa, Severe acute respiratory syndrome coronavirus 2
  REGION 1..12: note = Table B: HLA-DRB1*04:08L
EGIQYGRSGETL

SEQ ID NO: 26231 - protein, 14 aa, Severe acute respiratory syndrome coronavirus 2
  REGION 1..14: note = Table B: HLA-DRB1*04:08L HLA-DRB1*15:03L
GADLKSFDLGDELG

SEQ ID NO: 26232 - protein, 14 aa, Severe acute respiratory syndrome coronavirus 2
  REGION 1..14: note = Table B: HLA-DRB1*04:08L
NTKHSSGVTRELMR

SEQ ID NO: 26233 - protein, 13 aa, Severe acute respiratory syndrome coronavirus 2
  REGION 1..13: note = Table B: HLA-DRB1*04:08L
TRELMRELNGGAY

SEQ ID NO: 26234 - protein, 12 aa, Severe acute respiratory syndrome coronavirus 2
  REGION 1..12: note = Table B: HLA-DRB1*04:08L
LMRELNGGAYTR

SEQ ID NO: 26235 - protein, 13 aa, Severe acute respiratory syndrome coronavirus 2
  REGION 1..13: note = Table B: HLA-DRB1*04:08L
RELNGGAYTRYVD

SEQ ID NO: 26236 - protein, 15 aa, Severe acute respiratory syndrome coronavirus 2
  REGION 1..15: note = Table B: HLA-DRB1*04:08L
GAYTRYVDNNFCGPD

SEQ ID NO: 26237 - protein, 14 aa, Severe acute respiratory syndrome coronavirus 2
  REGION 1..14: note = Table B: HLA-DRB1*04:08L
EVGPEHSLAEYHNE

SEQ ID NO: 26238 - protein, 14 aa, Severe acute respiratory syndrome coronavirus 2
  REGION 1..14: note = Table B: HLA-DRB1*04:08L
IGCNHTGVVGEGSE

SEQ ID NO: 26239 - protein, 12 aa, Severe acute respiratory syndrome coronavirus 2
  REGION 1..12: note = Table B: HLA-DRB1*04:08L
VKGLDYKAFKQI

SEQ ID NO: 26240 - protein, 13 aa, Severe acute respiratory syndrome coronavirus 2
  REGION 1..13: note = Table B: HLA-DRB1*04:08L
NIGEQKSILSPLY

SEQ ID NO: 26241 - protein, 13 aa, Severe acute respiratory syndrome coronavirus 2
  REGION 1..13: note = Table B: HLA-DRB1*04:08L
VRSIFSRTLETAQ

SEQ ID NO: 26242 - protein, 13 aa, Severe acute respiratory syndrome coronavirus 2
  REGION 1..13: note = Table B: HLA-DRB1*04:08L
VYEKLKPVLDWLE

SEQ ID NO: 26243 - protein, 14 aa, Severe acute respiratory syndrome coronavirus 2
  REGION 1..14: note = Table B: HLA-DRB1*04:08L
FTLKGGAPTKVTFG

SEQ ID NO: 26244 - protein, 15 aa, Severe acute respiratory syndrome coronavirus 2
  REGION 1..15: note = Table B: HLA-DRB1*04:08L
ERIDKVLNEKCSAYT

SEQ ID NO: 26245 - protein, 13 aa, Severe acute respiratory syndrome coronavirus 2
  REGION 1..13: note = Table B: HLA-DRB1*04:08L
SGEFKLASHMYCS

SEQ ID NO: 26246 - protein, 14 aa, Severe acute respiratory syndrome coronavirus 2
  REGION 1..14: note = Table B: HLA-DRB1*04:08L
GKPLEFGATSAALQ

SEQ ID NO: 26247 - protein, 14 aa, Severe acute respiratory syndrome coronavirus 2
  REGION 1..14: note = Table B: HLA-DRB1*04:08L
TSAALQPEEEQEED

SEQ ID NO: 26248 - protein, 14 aa, Severe acute respiratory syndrome coronavirus 2
  REGION 1..14: note = Table B: HLA-DRB1*04:08L
IEVNSFSGYLKLTD

SEQ ID NO: 26249 - protein, 13 aa, Severe acute respiratory syndrome coronavirus 2
  REGION 1..13: note = Table B: HLA-DRB1*04:08L
AVFDKNLYDKLVS

SEQ ID NO: 26250 - protein, 13 aa, Severe acute respiratory syndrome coronavirus 2
  REGION 1..13: note = Table B: HLA-DRB1*04:08L
KNLYDKLVSSFLE

SEQ ID NO: 26251 - protein, 13 aa, Severe acute respiratory syndrome coronavirus 2
  REGION 1..13: note = Table B: HLA-DRB1*04:08L
TKFLTENLLLYID

SEQ ID NO: 26252 - protein, 12 aa, Severe acute respiratory syndrome coronavirus 2
  REGION 1..12: note = Table B: HLA-DRB1*04:08L
YIVGDVVQEGVL

SEQ ID NO: 26253 - protein, 11 aa, Severe acute respiratory syndrome coronavirus 2
  REGION 1..11: note = Table B: HLA-DRB1*04:08L
AIVSTIQRKYK

SEQ ID NO: 26254 - protein, 14 aa, Severe acute respiratory syndrome coronavirus 2
  REGION 1..14: note = Table B: HLA-DRB1*04:08L
STIQRKYKGIKIQE

SEQ ID NO: 26255 - protein, 15 aa, Severe acute respiratory syndrome coronavirus 2
  REGION 1..15: note = Table B: HLA-DRB1*04:08L
GVVDYGARFYFYTSK

SEQ ID NO: 26256 - protein, 13 aa, Severe acute respiratory syndrome coronavirus 2
  REGION 1..13: note = Table B: HLA-DRB1*04:08L
ETLVTMPLGYVTH

SEQ ID NO: 26257 - protein, 11 aa, Severe acute respiratory syndrome coronavirus 2
  REGION 1..11: note = Table B: HLA-DRB1*04:08L
SYLFQHANLDS

SEQ ID NO: 26258 - protein, 14 aa, Severe acute respiratory syndrome coronavirus 2
  REGION 1..14: note = Table B: HLA-DRB1*04:08L
KRVLNVVCKTCGQQ

SEQ ID NO: 26259 - protein, 16 aa, Severe acute respiratory syndrome coronavirus 2
  REGION 1..16: note = Table B: HLA-DRB1*04:08L
SSEYKGPITDVFYKEN

SEQ ID NO: 26260 - protein, 15 aa, Severe acute respiratory syndrome coronavirus 2
  REGION 1..15: note = Table B: HLA-DRB1*04:08L
IRCLWSTKPVETSNS

SEQ ID NO: 26261 - protein, 14 aa, Severe acute respiratory syndrome coronavirus 2
  REGION 1..14: note = Table B: HLA-DRB1*04:08L
KASMPTTIAKNTVK

SEQ ID NO: 26262 - protein, 11 aa, Severe acute respiratory syndrome coronavirus 2
  REGION 1..11: note = Table B: HLA-DRB1*04:08L
NYLKSPNFSKL

SEQ ID NO: 26263 - protein, 12 aa, Severe acute respiratory syndrome coronavirus 2
  REGION 1..12: note = Table B: HLA-DRB1*04:08L
YLKSPNFSKLIN

SEQ ID NO: 26264 - protein, 12 aa, Severe acute respiratory syndrome coronavirus 2
  REGION 1..12: note = Table B: HLA-DRB1*04:08L
SYFAVHFISNSW

SEQ ID NO: 26265 - protein, 13 aa, Severe acute respiratory syndrome coronavirus 2
  REGION 1..13: note = Table B: HLA-DRB1*04:08L
KSYVHVVDGCNSS

SEQ ID NO: 26266 - protein, 13 aa, Severe acute respiratory syndrome coronavirus 2
  REGION 1..13: note = Table B: HLA-DRB1*04:08L
TRVECTTIVNGVR

SEQ ID NO: 26267 - protein, 13 aa, Severe acute respiratory syndrome coronavirus 2
  REGION 1..13: note = Table B: HLA-DRB1*04:08L
EVARDLSLQFKRP

SEQ ID NO: 26268 - protein, 14 aa, Severe acute respiratory syndrome coronavirus 2
  REGION 1..14: note = Table B: HLA-DRB1*04:08L
GQKTYERHSLSHFV

SEQ ID NO: 26269 - protein, 13 aa, Severe acute respiratory syndrome coronavirus 2
  REGION 1..13: note = Table B: HLA-DRB1*04:08L
KTYERHSLSHFVN

SEQ ID NO: 26270 - protein, 15 aa, Severe acute respiratory syndrome coronavirus 2
  REGION 1..15: note = Table B: HLA-DRB1*04:08L
NAQVAKSHNIALIWN

SEQ ID NO: 26271 - protein, 16 aa, Severe acute respiratory syndrome coronavirus 2
  REGION 1..16: note = Table B: HLA-DRB1*04:08L
AQVAKSHNIALIWNVK

SEQ ID NO: 26272 - protein, 14 aa, Severe acute respiratory syndrome coronavirus 2
  REGION 1..14: note = Table B: HLA-DRB1*04:08L
ALKGGKIVNNWLKQ

SEQ ID NO: 26273 - protein, 11 aa, Severe acute respiratory syndrome coronavirus 2
  REGION 1..11: note = Table B: HLA-DRB1*04:08L
FYLITPVHVMS

SEQ ID NO: 26274 - protein, 14 aa, Severe acute respiratory syndrome coronavirus 2
  REGION 1..14: note = Table B: HLA-DRB1*04:08L
PVHVMSKHTDFSSE

SEQ ID NO: 26275 - protein, 12 aa, Severe acute respiratory syndrome coronavirus 2
  REGION 1..12: note = Table B: HLA-DRB1*04:08L
KAIDGGVTRDIA

SEQ ID NO: 26276 - protein, 13 aa, Severe acute respiratory syndrome coronavirus 2
  REGION 1..13: note = Table B: HLA-DRB1*04:08L
VGFVVPGLPGTIL

SEQ ID NO: 26277 - protein, 12 aa, Severe acute respiratory syndrome coronavirus 2
  REGION 1..12: note = Table B: HLA-DRB1*04:08L
FVVPGLPGTILR

SEQ ID NO: 26278 - protein, 15 aa, Severe acute respiratory syndrome coronavirus 2
  REGION 1..15: note = Table B: HLA-DRB1*04:08L
ILRTTNGDFLHFLPR

SEQ ID NO: 26279 - protein, 14 aa, Severe acute respiratory syndrome coronavirus 2
  REGION 1..14: note = Table B: HLA-DRB1*04:08L
PNTYLEGSVRVVTT

SEQ ID NO: 26280 - protein, 12 aa, Severe acute respiratory syndrome coronavirus 2
  REGION 1..12: note = Table B: HLA-DRB1*04:08L
DYYRSLPGVFCG

SEQ ID NO: 26281 - protein, 13 aa, Severe acute respiratory syndrome coronavirus 2
  REGION 1..13: note = Table B: HLA-DRB1*04:08L
SIVAGGIVAIVVT

SEQ ID NO: 26282 - protein, 12 aa, Severe acute respiratory syndrome coronavirus 2
  REGION 1..12: note = Table B: HLA-DRB1*04:08L
VLLPLTQYNRYL

SEQ ID NO: 26283 - protein, 12 aa, Severe acute respiratory syndrome coronavirus 2
  REGION 1..12: note = Table B: HLA-DRB1*04:08L
RYLALYNKYKYF

SEQ ID NO: 26284 - protein, 14 aa, Severe acute respiratory syndrome coronavirus 2
  REGION 1..14: note = Table B: HLA-DRB1*04:08L HLA-DQA1*02:01-B1*03:03L
REAACCHLAKALND

SEQ ID NO: 26285 - protein, 12 aa, Severe acute respiratory syndrome coronavirus 2
  REGION 1..12: note = Table B: HLA-DRB1*04:08L
PKYKFVRIQPGQ

SEQ ID NO: 26286 - protein, 14 aa, Severe acute respiratory syndrome coronavirus 2
  REGION 1..14: note = Table B: HLA-DRB1*04:08L
FCYMHHMELPTGVH

SEQ ID NO: 26287 - protein, 15 aa, Severe acute respiratory syndrome coronavirus 2
  REGION 1..15: note = Table B: HLA-DRB1*04:08L
VRQCSGVTFQSAVKR

SEQ ID NO: 26288 - protein, 14 aa, Severe acute respiratory syndrome coronavirus 2
  REGION 1..14: note = Table B: HLA-DRB1*04:08L
YDYLVSTQEFRYMN

SEQ ID NO: 26289 - protein, 14 aa, Severe acute respiratory syndrome coronavirus 2
  REGION 1..14: note = Table B: HLA-DRB1*04:08L
DYLVSTQEFRYMNS

SEQ ID NO: 26290 - protein, 15 aa, Severe acute respiratory syndrome coronavirus 2
  REGION 1..15: note = Table B: HLA-DRB1*04:08L
FPKSDGTGTIYTELE

SEQ ID NO: 26291 - protein, 13 aa, Severe acute respiratory syndrome coronavirus 2
  REGION 1..13: note = Table B: HLA-DRB1*04:08L
NNLNRGMVLGSLA

SEQ ID NO: 26292 - protein, 13 aa, Severe acute respiratory syndrome coronavirus 2
  REGION 1..13: note = Table B: HLA-DRB1*04:08L
SLAATVRLQAGNA

SEQ ID NO: 26293 - protein, 17 aa, Severe acute respiratory syndrome coronavirus 2
  REGION 1..17: note = Table B: HLA-DRB1*04:08L
NPKGFCDLKGKYVQIPT

SEQ ID NO: 26294 - protein, 14 aa, Severe acute respiratory syndrome coronavirus 2
  REGION 1..14: note = Table B: HLA-DRB1*04:08L
TPCGTGTSTDVVYR

SEQ ID NO: 26295 - protein, 15 aa, Severe acute respiratory syndrome coronavirus 2
  REGION 1..15: note = Table B: HLA-DRB1*04:08L
VRQALLKTVQFCDAM

SEQ ID NO: 26296 - protein, 13 aa, Severe acute respiratory syndrome coronavirus 2
  REGION 1..13: note = Table B: HLA-DRB1*04:08L HLA-DRB1*15:03L
FDRYFKYWDQTYH

SEQ ID NO: 26297 - protein, 15 aa, Severe acute respiratory syndrome coronavirus 2
  REGION 1..15: note = Table B: HLA-DRB1*04:08L
FNVLFSTVFPPTSFG

SEQ ID NO: 26298 - protein, 14 aa, Severe acute respiratory syndrome coronavirus 2
  REGION 1..14: note = Table B: HLA-DRB1*04:08L
STVFPPTSFGPLVR

SEQ ID NO: 26299 - protein, 13 aa, Severe acute respiratory syndrome coronavirus 2
  REGION 1..13: note = Table B: HLA-DRB1*04:08L
IFVDGVPFVVSTG

SEQ ID NO: 26300 - protein, 11 aa, Severe acute respiratory syndrome coronavirus 2
  REGION 1..11: note = Table B: HLA-DRB1*04:08L
PFVVSTGYHFR

SEQ ID NO: 26301 - protein, 12 aa, Severe acute respiratory syndrome coronavirus 2
  REGION 1..12: note = Table B: HLA-DRB1*04:08L
FYDFAVSKGFFK

SEQ ID NO: 26302 - protein, 14 aa, Severe acute respiratory syndrome coronavirus 2
  REGION 1..14: note = Table B: HLA-DRB1*04:08L
SSVELKHFFFAQDG

SEQ ID NO: 26303 - protein, 12 aa, Severe acute respiratory syndrome coronavirus 2
  REGION 1..12: note = Table B: HLA-DRB1*04:08L
AGFPFNKWGKAR

SEQ ID NO: 26304 - protein, 12 aa, Severe acute respiratory syndrome coronavirus 2
  REGION 1..12: note = Table B: HLA-DRB1*04:08L
MLRIMASLVLAR

SEQ ID NO: 26305 - protein, 11 aa, Severe acute respiratory syndrome coronavirus 2
  REGION 1..11: note = Table B: HLA-DRB1*04:08L
RFYRLANECAQ

SEQ ID NO: 26306 - protein, 14 aa, Severe acute respiratory syndrome coronavirus 2
  REGION 1..14: note = Table B: HLA-DRB1*04:08L
VRNLQHRLYECLYR

SEQ ID NO: 26307 - protein, 14 aa, Severe acute respiratory syndrome coronavirus 2
  REGION 1..14: note = Table B: HLA-DRB1*04:08L
RFVSLAIDAYPLTK

SEQ ID NO: 26308 - protein, 16 aa, Severe acute respiratory syndrome coronavirus 2
  REGION 1..16: note = Table B: HLA-DRB1*04:08L
VTQLYLGGMSYYCKSH

SEQ ID NO: 26309 - protein, 12 aa, Severe acute respiratory syndrome coronavirus 2
  REGION 1..12: note = Table B: HLA-DRB1*04:08L
SWEVGKPRPPLN

SEQ ID NO: 26310 - protein, 13 aa, Severe acute respiratory syndrome coronavirus 2
  REGION 1..13: note = Table B: HLA-DRB1*04:08L
RVTKNSKVQIGEY

SEQ ID NO: 26311 - protein, 15 aa, Severe acute respiratory syndrome coronavirus 2
  REGION 1..15: note = Table B: HLA-DRB1*04:08L
SKVQIGEYTFEKGDY

SEQ ID NO: 26312 - protein, 12 aa, Severe acute respiratory syndrome coronavirus 2
  REGION 1..12: note = Table B: HLA-DRB1*04:08L
AVVYRGTTTYKL

SEQ ID NO: 26313 - protein, 12 aa, Severe acute respiratory syndrome coronavirus 2
  REGION 1..12: note = Table B: HLA-DRB1*04:08L
GDPAQLPAPRTL

SEQ ID NO: 26314 - protein, 11 aa, Severe acute respiratory syndrome coronavirus 2
  REGION 1..11: note = Table B: HLA-DRB1*04:08L
KILGLPTQTVD

SEQ ID NO: 26315 - protein, 15 aa, Severe acute respiratory syndrome coronavirus 2
  REGION 1..15: note = Table B: HLA-DRB1*04:08L
GLHPTQAPTHLSVDT

SEQ ID NO: 26316 - protein, 12 aa, Severe acute respiratory syndrome coronavirus 2
  REGION 1..12: note = Table B: HLA-DRB1*04:08L
QFKHLIPLMYKG

SEQ ID NO: 26317 - protein, 12 aa, Severe acute respiratory syndrome coronavirus 2
  REGION 1..12: note = Table B: HLA-DRB1*04:08L
VFVLWAHGFELT

SEQ ID NO: 26318 - protein, 13 aa, Severe acute respiratory syndrome coronavirus 2
  REGION 1..13: note = Table B: HLA-DRB1*04:08L
HGFELTSMKYFVK

SEQ ID NO: 26319 - protein, 14 aa, Severe acute respiratory syndrome coronavirus 2
  REGION 1..14: note = Table B: HLA-DRB1*04:08L
DWTIEYPIIGDELK

SEQ ID NO: 26320 - protein, 13 aa, Severe acute respiratory syndrome coronavirus 2
  REGION 1..13: note = Table B: HLA-DRB1*04:08L
RVLSNLNLPGCDG

SEQ ID NO: 26321 - protein, 11 aa, Severe acute respiratory syndrome coronavirus 2
  REGION 1..11: note = Table B: HLA-DRB1*04:08L
AFDKSAFVNLK

SEQ ID NO: 26322 - protein, 13 aa, Severe acute respiratory syndrome coronavirus 2
  REGION 1..13: note = Table B: HLA-DRB1*04:08L
NVVNKGHFDGQQG

SEQ ID NO: 26323 - protein, 14 aa, Severe acute respiratory syndrome coronavirus 2
  REGION 1..14: note = Table B: HLA-DRB1*04:08L
PEVKILNNLGVDIA

SEQ ID NO: 26324 - protein, 13 aa, Severe acute respiratory syndrome coronavirus 2
  REGION 1..13: note = Table B: HLA-DRB1*04:08L
VKILNNLGVDIAA

SEQ ID NO: 26325 - protein, 13 aa, Severe acute respiratory syndrome coronavirus 2
  REGION 1..13: note = Table B: HLA-DRB1*04:08L
SVKGLQPSVGPKQ

SEQ ID NO: 26326 - protein, 14 aa, Severe acute respiratory syndrome coronavirus 2
  REGION 1..14: note = Table B: HLA-DRB1*04:08L
ASLNGVTLIGEAVK

SEQ ID NO: 26327 - protein, 14 aa, Severe acute respiratory syndrome coronavirus 2
  REGION 1..14: note = Table B: HLA-DRB1*04:08L
VVQQLPETYFTQSR

SEQ ID NO: 26328 - protein, 14 aa, Severe acute respiratory syndrome coronavirus 2
  REGION 1..14: note = Table B: HLA-DRB1*04:08L
LAMDEFIERYKLEG

SEQ ID NO: 26329 - protein, 12 aa, Severe acute respiratory syndrome coronavirus 2
  REGION 1..12: note = Table B: HLA-DRB1*04:08L
AFEHIVYGDFSH

SEQ ID NO: 26330 - protein, 16 aa, Severe acute respiratory syndrome coronavirus 2
  REGION 1..16: note = Table B: HLA-DRB1*04:08L
SHSQLGGLHLLIGLAK

SEQ ID NO: 26331 - protein, 13 aa, Severe acute respiratory syndrome coronavirus 2
  REGION 1..13: note = Table B: HLA-DRB1*04:08L
YTEISFMLWCKDG

SEQ ID NO: 26332 - protein, 13 aa, Severe acute respiratory syndrome coronavirus 2
  REGION 1..13: note = Table B: HLA-DRB1*04:08L
TEISFMLWCKDGH

SEQ ID NO: 26333 - protein, 14 aa, Severe acute respiratory syndrome coronavirus 2
  REGION 1..14: note = Table B: HLA-DRB1*04:08L
AGSDKGVAPGTAVL

SEQ ID NO: 26334 - protein, 11 aa, Severe acute respiratory syndrome coronavirus 2
  REGION 1..11: note = Table B: HLA-DRB1*04:08L
LIISDMYDPKT

SEQ ID NO: 26335 - protein, 12 aa, Severe acute respiratory syndrome coronavirus 2
  REGION 1..12: note = Table B: HLA-DRB1*04:08L
HSWNADLYKLMG

SEQ ID NO: 26336 - protein, 14 aa, Severe acute respiratory syndrome coronavirus 2
  REGION 1..14: note = Table B: HLA-DRB1*04:08L
NADLYKLMGHFAWW

SEQ ID NO: 26337 - protein, 13 aa, Severe acute respiratory syndrome coronavirus 2
  REGION 1..13: note = Table B: HLA-DRB1*04:08L
AWWTAFVTNVNAS

SEQ ID NO: 26338 - protein, 14 aa, Severe acute respiratory syndrome coronavirus 2
  REGION 1..14: note = Table B: HLA-DRB1*04:08L
LLSKGRLIIRENNR

SEQ ID NO: 26339 - protein, 13 aa, Severe acute respiratory syndrome coronavirus 2
  REGION 1..13: note = Table B: HLA-DRB1*04:08L
FTRGVYYPDKVFR

SEQ ID NO: 26340 - protein, 13 aa, Severe acute respiratory syndrome coronavirus 2
  REGION 1..13: note = Table B: HLA-DRB1*04:08L
SWMESEFRVYSSA

SEQ ID NO: 26341 - protein, 12 aa, Severe acute respiratory syndrome coronavirus 2
  REGION 1..12: note = Table B: HLA-DRB1*04:08L
NIDGYFKIYSKH

SEQ ID NO: 26342 - protein, 12 aa, Severe acute respiratory syndrome coronavirus 2
  REGION 1..12: note = Table B: HLA-DRB1*04:08L
IYSKHTPINLVR

SEQ ID NO: 26343 - protein, 13 aa, Severe acute respiratory syndrome coronavirus 2
  REGION 1..13: note = Table B: HLA-DRB1*04:08L
HRSYLTPGDSSSG

SEQ ID NO: 26344 - protein, 12 aa, Severe acute respiratory syndrome coronavirus 2
  REGION 1..12: note = Table B: HLA-DRB1*04:08L
GWTAGAAAYYVG

SEQ ID NO: 26345 - protein, 15 aa, Severe acute respiratory syndrome coronavirus 2
  REGION 1..15: note = Table B: HLA-DRB1*04:08L
AWNRKRISNCVADYS

SEQ ID NO: 26346 - protein, 11 aa, Severe acute respiratory syndrome coronavirus 2
  REGION 1..11: note = Table B: HLA-DRB1*04:08L
TFKCYGVSPTK

SEQ ID NO: 26347 - protein, 13 aa, Severe acute respiratory syndrome coronavirus 2
  REGION 1..13: note = Table B: HLA-DRB1*04:08L
RQIAPGQTGKIAD

SEQ ID NO: 26348 - protein, 14 aa, Severe acute respiratory syndrome coronavirus 2
  REGION 1..14: note = Table B: HLA-DRB1*04:08L
SYGFQPTNGVGYQP

SEQ ID NO: 26349 - protein, 14 aa, Severe acute respiratory syndrome coronavirus 2
  REGION 1..14: note = Table B: HLA-DRB1*04:08L
SVITPGTNTSNQVA

SEQ ID NO: 26350 - protein, 13 aa, Severe acute respiratory syndrome coronavirus 2
  REGION 1..13: note = Table B: HLA-DRB1*04:08L
VAIHADQLTPTWR

SEQ ID NO: 26351 - protein, 14 aa, Severe acute respiratory syndrome coronavirus 2
  REGION 1..14: note = Table B: HLA-DRB1*04:08L
RARSVASQSIIAYT

SEQ ID NO: 26352 - protein, 14 aa, Severe acute respiratory syndrome coronavirus 2
  REGION 1..14: note = Table B: HLA-DRB1*04:08L
VFAQVKQIYKTPPI

SEQ ID NO: 26353 - protein, 13 aa, Severe acute respiratory syndrome coronavirus 2
  REGION 1..13: note = Table B: HLA-DRB1*04:08L
VTLADAGFIKQYG

SEQ ID NO: 26354 - protein, 13 aa, Severe acute respiratory syndrome coronavirus 2
  REGION 1..13: note = Table B: HLA-DRB1*04:08L
QIPFAMQMAYRFN

SEQ ID NO: 26355 - protein, 12 aa, Severe acute respiratory syndrome coronavirus 2
  REGION 1..12: note = Table B: HLA-DRB1*04:08L
FNSAIGKIQDSL

SEQ ID NO: 26356 - protein, 14 aa, Severe acute respiratory syndrome coronavirus 2
  REGION 1..14: note = Table B: HLA-DRB1*04:08L
KIQDSLSSTASALG

SEQ ID NO: 26357 - protein, 15 aa, Severe acute respiratory syndrome coronavirus 2
  REGION 1..15: note = Table B: HLA-DRB1*04:08L
DKVEAEVQIDRLITG

SEQ ID NO: 26358 - protein, 12 aa, Severe acute respiratory syndrome coronavirus 2
  REGION 1..12: note = Table B: HLA-DRB1*04:08L
IDRLITGRLQSL

SEQ ID NO: 26359 - protein, 12 aa, Severe acute respiratory syndrome coronavirus 2
  REGION 1..12: note = Table B: HLA-DRB1*04:08L
QLIRAAEIRASA

SEQ ID NO: 26360 - protein, 14 aa, Severe acute respiratory syndrome coronavirus 2
  REGION 1..14: note = Table B: HLA-DRB1*04:08L
VFVSNGTHWFVTQR

SEQ ID NO: 26361 - protein, 14 aa, Severe acute respiratory syndrome coronavirus 2
  REGION 1..14: note = Table B: HLA-DRB1*04:08L
LNESLIDLQELGKY

SEQ ID NO: 26362 - protein, 12 aa, Severe acute respiratory syndrome coronavirus 2
  REGION 1..12: note = Table B: HLA-DRB1*04:08L
MRIFTIGTVTLK

SEQ ID NO: 26363 - protein, 12 aa, Severe acute respiratory syndrome coronavirus 2
  REGION 1..12: note = Table B: HLA-DRB1*04:08L
RIFTIGTVTLKQ

SEQ ID NO: 26364 - protein, 11 aa, Severe acute respiratory syndrome coronavirus 2
  REGION 1..11: note = Table B: HLA-DRB1*04:08L
FQSASKIITLK

SEQ ID NO: 26365 - protein, 15 aa, Severe acute respiratory syndrome coronavirus 2
  REGION 1..15: note = Table B: HLA-DRB1*04:08L
HTNCYDYCIPYNSVT

SEQ ID NO: 26366 - protein, 12 aa, Severe acute respiratory syndrome coronavirus 2
  REGION 1..12: note = Table B: HLA-DRB1*04:08L
SGDGTTSPISEH

SEQ ID NO: 26367 - protein, 16 aa, Severe acute respiratory syndrome coronavirus 2
  REGION 1..16: note = Table B: HLA-DRB1*04:08L
SPISEHDYQIGGYTEK

SEQ ID NO: 26368 - protein, 13 aa, Severe acute respiratory syndrome coronavirus 2
  REGION 1..13: note = Table B: HLA-DRB1*04:08L
HDYQIGGYTEKWE

SEQ ID NO: 26369 - protein, 15 aa, Severe acute respiratory syndrome coronavirus 2
  REGION 1..15: note = Table B: HLA-DRB1*04:08L
ESGVKDCVVLHSYFT

SEQ ID NO: 26370 - protein, 12 aa, Severe acute respiratory syndrome coronavirus 2
  REGION 1..12: note = Table B: HLA-DRB1*04:08L
SYFTSDYYQLYS

SEQ ID NO: 26371 - protein, 13 aa, Severe acute respiratory syndrome coronavirus 2
  REGION 1..13: note = Table B: HLA-DRB1*04:08L
HLRIAGHHLGRCD

SEQ ID NO: 26372 - protein, 15 aa, Severe acute respiratory syndrome coronavirus 2
  REGION 1..15: note = Table B: HLA-DRB1*04:08L
AGHHLGRCDIKDLPK

SEQ ID NO: 26373 - protein, 14 aa, Severe acute respiratory syndrome coronavirus 2
  REGION 1..14: note = Table B: HLA-DRB1*04:08L
PKEITVATSRTLSY

SEQ ID NO: 26374 - protein, 13 aa, Severe acute respiratory syndrome coronavirus 2
  REGION 1..13: note = Table B: HLA-DRB1*04:08L
EITVATSRTLSYY

SEQ ID NO: 26375 - protein, 15 aa, Severe acute respiratory syndrome coronavirus 2
  REGION 1..15: note = Table B: HLA-DRB1*04:08L
LRARSVSPKLFIRQE

SEQ ID NO: 26376 - protein, 13 aa, Severe acute respiratory syndrome coronavirus 2
  REGION 1..13: note = Table B: HLA-DRB1*04:08L
LFIRQEEVQELYS

SEQ ID NO: 26377 - protein, 14 aa, Severe acute respiratory syndrome coronavirus 2
  REGION 1..14: note = Table B: HLA-DRB1*04:08L
TTLPKGFYAEGSRG

SEQ ID NO: 26378 - protein, 15 aa, Severe acute respiratory syndrome coronavirus 2
  REGION 1..15: note = Table B: HLA-DRB1*04:08L
ESKMSGKGQQQQGQT

SEQ ID NO: 26379 - protein, 14 aa, Severe acute respiratory syndrome coronavirus 2
  REGION 1..14: note = Table B: HLA-DRB1*04:08L
VTKKSAAEASKKPR

SEQ ID NO: 26380 - protein, 14 aa, Severe acute respiratory syndrome coronavirus 2
  REGION 1..14: note = Table B: HLA-DRB1*04:08L
KKSAAEASKKPRQK

SEQ ID NO: 26381 - protein, 14 aa, Severe acute respiratory syndrome coronavirus 2
  REGION 1..14: note = Table B: HLA-DRB1*04:08L
KSAAEASKKPRQKR

SEQ ID NO: 26382 - protein, 14 aa, Severe acute respiratory syndrome coronavirus 2
  REGION 1..14: note = Table B: HLA-DRB1*04:08L
QKRTATKAYNVTQA

SEQ ID NO: 26383 - protein, 16 aa, Severe acute respiratory syndrome coronavirus 2
  REGION 1..16: note = Table B: HLA-DRB1*04:08L
DKKKKADETQALPQRQ

SEQ ID NO: 26384 - protein, 14 aa, Severe acute respiratory syndrome coronavirus 2
  REGION 1..14: note = Table B: HLA-DRB1*08:02L
AWYTERSEKSYELQ

SEQ ID NO: 26385 - protein, 14 aa, Severe acute respiratory syndrome coronavirus 2
  REGION 1..14: note = Table B: HLA-DRB1*08:02L
DAVIKTLQPVSELL

SEQ ID NO: 26386 - protein, 15 aa, Severe acute respiratory syndrome coronavirus 2
  REGION 1..15: note = Table B: HLA-DRB1*08:02L
EDDYQGKPLEFGATS

SEQ ID NO: 26387 - protein, 17 aa, Severe acute respiratory syndrome coronavirus 2
  REGION 1..17: note = Table B: HLA-DRB1*08:02L
VQPQLEMELTPVVQTIE

SEQ ID NO: 26388 - protein, 17 aa, Severe acute respiratory syndrome coronavirus 2
  REGION 1..17: note = Table B: HLA-DRB1*08:02L
VKPTVVVNAANVYLKHG

SEQ ID NO: 26389 - protein, 16 aa, Severe acute respiratory syndrome coronavirus 2
  REGION 1..16: note = Table B: HLA-DRB1*08:02L
VTTTLEETKFLTENLL

SEQ ID NO: 26390 - protein, 13 aa, Severe acute respiratory syndrome coronavirus 2
  REGION 1..13: note = Table B: HLA-DRB1*08:02L
FYFYTSKTTVASL

SEQ ID NO: 26391 - protein, 15 aa, Severe acute respiratory syndrome coronavirus 2
  REGION 1..15: note = Table B: HLA-DRB1*08:02L
DGEVITFDNLKTLLS

SEQ ID NO: 26392 - protein, 16 aa, Severe acute respiratory syndrome coronavirus 2
  REGION 1..16: note = Table B: HLA-DRB1*08:02L
YPQVNGLTSIKWADNN

SEQ ID NO: 26393 - protein, 14 aa, Severe acute respiratory syndrome coronavirus 2
  REGION 1..14: note = Table B: HLA-DRB1*08:02L
DLVPNQPYPNASFD

SEQ ID NO: 26394 - protein, 14 aa, Severe acute respiratory syndrome coronavirus 2
  REGION 1..14: note = Table B: HLA-DRB1*08:02L
SFDVLKSEDAQGMD

SEQ ID NO: 26395 - protein, 13 aa, Severe acute respiratory syndrome coronavirus 2
  REGION 1..13: note = Table B: HLA-DRB1*08:02L
AGSTFISDEVARD

SEQ ID NO: 26396 - protein, 16 aa, Severe acute respiratory syndrome coronavirus 2
  REGION 1..16: note = Table B: HLA-DRB1*08:02L
IIGYKAIDGGVTRDIA

SEQ ID NO: 26397 - protein, 13 aa, Severe acute respiratory syndrome coronavirus 2
  REGION 1..13: note = Table B: HLA-DRB1*08:02L
FGEYSHVVAFNTL

SEQ ID NO: 26398 - protein, 14 aa, Severe acute respiratory syndrome coronavirus 2
  REGION 1..14: note = Table B: HLA-DRB1*08:02L
LVYKVYYGNALDQA

SEQ ID NO: 26399 - protein, 16 aa, Severe acute respiratory syndrome coronavirus 2
  REGION 1..16: note = Table B: HLA-DRB1*08:02L
LSEISMDNSPNLAWPL

SEQ ID NO: 26400 - protein, 18 aa, Severe acute respiratory syndrome coronavirus 2
  REGION 1..18: note = Table B: HLA-DRB1*08:02L
DEDDNLIDSYFVVKRHTF

SEQ ID NO: 26401 - protein, 14 aa, Severe acute respiratory syndrome coronavirus 2
  REGION 1..14: note = Table B: HLA-DRB1*08:02L
ELLVYAADPAMHAA

SEQ ID NO: 26402 - protein, 15 aa, Severe acute respiratory syndrome coronavirus 2
  REGION 1..15: note = Table B: HLA-DRB1*08:02L
DDYVYLPYPDPSRIL

SEQ ID NO: 26403 - protein, 16 aa, Severe acute respiratory syndrome coronavirus 2
  REGION 1..16: note = Table B: HLA-DRB1*08:02L
NYVFTGYRVTKNSKVQ

SEQ ID NO: 26404 - protein, 15 aa, Severe acute respiratory syndrome coronavirus 2
  REGION 1..15: note = Table B: HLA-DRB1*08:02L
FTGYRVTKNSKVQIG

SEQ ID NO: 26405 - protein, 16 aa, Severe acute respiratory syndrome coronavirus 2
  REGION 1..16: note = Table B: HLA-DRB1*08:02L
TGYRVTKNSKVQIGEY

SEQ ID NO: 26406 - protein, 16 aa, Severe acute respiratory syndrome coronavirus 2
  REGION 1..16: note = Table B: HLA-DRB1*08:02L HLA-DRB1*08:03L
GYRVTKNSKVQIGEYT

SEQ ID NO: 26407 - protein, 15 aa, Severe acute respiratory syndrome coronavirus 2
  REGION 1..15: note = Table B: HLA-DRB1*08:02L
ITHDVSSAINRPQIG

SEQ ID NO: 26408 - protein, 15 aa, Severe acute respiratory syndrome coronavirus 2
  REGION 1..15: note = Table B: HLA-DRB1*08:02L
GDELKINAACRKVQH

SEQ ID NO: 26409 - protein, 18 aa, Severe acute respiratory syndrome coronavirus 2
  REGION 1..18: note = Table B: HLA-DRB1*08:02L
KVQHMVVKAALLADKFPV

SEQ ID NO: 26410 - protein, 17 aa, Severe acute respiratory syndrome coronavirus 2
  REGION 1..17: note = Table B: HLA-DRB1*08:02L
GLHLLIGLAKRFKESPF

SEQ ID NO: 26411 - protein, 18 aa, Severe acute respiratory syndrome coronavirus 2
  REGION 1..18: note = Table B: HLA-DRB1*08:02L
HVETFYPKLQSSQAWQPG

SEQ ID NO: 26412 - protein, 15 aa, Severe acute respiratory syndrome coronavirus 2
  REGION 1..15: note = Table B: HLA-DRB1*08:02L
SDMYDPKTKNVTKEN

SEQ ID NO: 26413 - protein, 17 aa, Severe acute respiratory syndrome coronavirus 2
  REGION 1..17: note = Table B: HLA-DRB1*08:02L
SEAFLIGCNYLGKPREQ

SEQ ID NO: 26414 - protein, 16 aa, Severe acute respiratory syndrome coronavirus 2
  REGION 1..16: note = Table B: HLA-DRB1*08:02L
KSWMESEFRVYSSANN

SEQ ID NO: 26415 - protein, 18 aa, Severe acute respiratory syndrome coronavirus 2
  REGION 1..18: note = Table B: HLA-DRB1*08:02L
LPIGINITRFQTLLALHR

SEQ ID NO: 26416 - protein, 14 aa, Severe acute respiratory syndrome coronavirus 2
  REGION 1..14: note = Table B: HLA-DRB1*08:02L
LKSFTVEKGIYQTS

SEQ ID NO: 26417 - protein, 15 aa, Severe acute respiratory syndrome coronavirus 2
  REGION 1..15: note = Table B: HLA-DRB1*08:02L
GGNYNYLYRLFRKSN

SEQ ID NO: 26418 - protein, 15 aa, Severe acute respiratory syndrome coronavirus 2
  REGION 1..15: note = Table B: HLA-DRB1*08:02L
VKQIYKTPPIKDFGG

SEQ ID NO: 26419 - protein, 13 aa, Severe acute respiratory syndrome coronavirus 2
  REGION 1..13: note = Table B: HLA-DRB1*08:02L
NFSQILPDPSKPS

SEQ ID NO: 26420 - protein, 15 aa, Severe acute respiratory syndrome coronavirus 2
  REGION 1..15: note = Table B: HLA-DRB1*08:02L
NTVYDPLQPELDSFK

SEQ ID NO: 26421 - protein, 13 aa, Severe acute respiratory syndrome coronavirus 2
  REGION 1..13: note = Table B: HLA-DRB1*08:02L
LAVFQSASKIITL

SEQ ID NO: 26422 - protein, 17 aa, Severe acute respiratory syndrome coronavirus 2
  REGION 1..17: note = Table B: HLA-DRB1*08:02L
GDQELIRQGTDYKHWPQ

SEQ ID NO: 26423 - protein, 13 aa, Severe acute respiratory syndrome coronavirus 2
  REGION 1..13: note = Table B: HLA-DRB1*08:03L
LLEILQKEKVNIN

SEQ ID NO: 26424 - protein, 12 aa, Severe acute respiratory syndrome coronavirus 2
  REGION 1..12: note = Table B: HLA-DRB1*08:03L
TVYEKLKPVLDW

SEQ ID NO: 26425 - protein, 15 aa, Severe acute respiratory syndrome coronavirus 2
  REGION 1..15: note = Table B: HLA-DRB1*08:03L
INGLMLLEIKDTEKY

SEQ ID NO: 26426 - protein, 15 aa, Severe acute respiratory syndrome coronavirus 2
  REGION 1..15: note = Table B: HLA-DRB1*08:03L
VQGYKSVNITFELDE

SEQ ID NO: 26427 - protein, 14 aa, Severe acute respiratory syndrome coronavirus 2
  REGION 1..14: note = Table B: HLA-DRB1*08:03L
QQIELKFNPPALQD

SEQ ID NO: 26428 - protein, 14 aa, Severe acute respiratory syndrome coronavirus 2
  REGION 1..14: note = Table B: HLA-DRB1*08:03L
QIELKFNPPALQDA

SEQ ID NO: 26429 - protein, 13 aa, Severe acute respiratory syndrome coronavirus 2
  REGION 1..13: note = Table B: HLA-DRB1*08:03L
NKTVGELGDVRET

SEQ ID NO: 26430 - protein, 13 aa, Severe acute respiratory syndrome coronavirus 2
  REGION 1..13: note = Table B: HLA-DRB1*08:03L
SDEVARDLSLQFK

SEQ ID NO: 26431 - protein, 15 aa, Severe acute respiratory syndrome coronavirus 2
  REGION 1..15: note = Table B: HLA-DRB1*08:03L
SIHLYFDKAGQKTYE

SEQ ID NO: 26432 - protein, 17 aa, Severe acute respiratory syndrome coronavirus 2
  REGION 1..17: note = Table B: HLA-DRB1*08:03L
TKDVVECLKLSHQSDIE

SEQ ID NO: 26433 - protein, 14 aa, Severe acute respiratory syndrome coronavirus 2
  REGION 1..14: note = Table B: HLA-DRB1*08:03L
TDTCFANKHADFDT

SEQ ID NO: 26434 - protein, 16 aa, Severe acute respiratory syndrome coronavirus 2
  REGION 1..16: note = Table B: HLA-DRB1*08:03L
DTCFANKHADFDTWFS

SEQ ID NO: 26435 - protein, 14 aa, Severe acute respiratory syndrome coronavirus 2
  REGION 1..14: note = Table B: HLA-DRB1*08:03L
FTMLRKLDNDALNN

SEQ ID NO: 26436 - protein, 15 aa, Severe acute respiratory syndrome coronavirus 2
  REGION 1..15: note = Table B: HLA-DRB1*08:03L
IAATRGATVVIGTSK

SEQ ID NO: 26437 - protein, 16 aa, Severe acute respiratory syndrome coronavirus 2
  REGION 1..16: note = Table B: HLA-DRB1*08:03L
GATVVIGTSKFYGGWH

SEQ ID NO: 26438 - protein, 16 aa, Severe acute respiratory syndrome coronavirus 2
  REGION 1..16: note = Table B: HLA-DRB1*08:03L
ATVVIGTSKFYGGWHN

SEQ ID NO: 26439 - protein, 17 aa, Severe acute respiratory syndrome coronavirus 2
  REGION 1..17: note = Table B: HLA-DRB1*08:03L
ATTAYANSVFNICQAVT

SEQ ID NO: 26440 - protein, 15 aa, Severe acute respiratory syndrome coronavirus 2
  REGION 1..15: note = Table B: HLA-DRB1*08:03L
ECLYRNRDVDTDFVN

SEQ ID NO: 26441 - protein, 15 aa, Severe acute respiratory syndrome coronavirus 2
  REGION 1..15: note = Table B: HLA-DRB1*08:03L
DVDTDFVNEFYAYLR

SEQ ID NO: 26442 - protein, 11 aa, Severe acute respiratory syndrome coronavirus 2
  REGION 1..11: note = Table B: HLA-DRB1*08:03L
YLQYIRKLHDE

SEQ ID NO: 26443 - protein, 15 aa, Severe acute respiratory syndrome coronavirus 2
  REGION 1..15: note = Table B: HLA-DRB1*08:03L
LEGYAFEHIVYGDFS

SEQ ID NO: 26444 - protein, 16 aa, Severe acute respiratory syndrome coronavirus 2
  REGION 1..16: note = Table B: HLA-DRB1*08:03L
VAIKITEHSWNADLYK

SEQ ID NO: 26445 - protein, 17 aa, Severe acute respiratory syndrome coronavirus 2
  REGION 1..17: note = Table B: HLA-DRB1*08:03L
GVYYHKNNKSWMESEFR

SEQ ID NO: 26446 - protein, 14 aa, Severe acute respiratory syndrome coronavirus 2
  REGION 1..14: note = Table B: HLA-DRB1*08:03L
VFNATRFASVYAWN

SEQ ID NO: 26447 - protein, 15 aa, Severe acute respiratory syndrome coronavirus 2
  REGION 1..15: note = Table B: HLA-DRB1*08:03L
GVLTESNKKFLPFQQ

SEQ ID NO: 26448 - protein, 13 aa, Severe acute respiratory syndrome coronavirus 2
  REGION 1..13: note = Table B: HLA-DRB1*08:03L
SYYKLGASQRVAG

SEQ ID NO: 26449 - protein, 16 aa, Severe acute respiratory syndrome coronavirus 2
  REGION 1..16: note = Table B: HLA-DRB1*08:03L
ASQRVAGDSGFAAYSR

SEQ ID NO: 26450 - protein, 11 aa, Severe acute respiratory syndrome coronavirus 2
  REGION 1..11: note = Table B: HLA-DQA1*02:01-B1*03:03L
SGETLGVLVPH

SEQ ID NO: 26451 - protein, 10 aa, Severe acute respiratory syndrome coronavirus 2
  REGION 1..10: note = Table B: HLA-DQA1*02:01-B1*03:03L
VFPLNSIIKT

SEQ ID NO: 26452 - protein, 12 aa, Severe acute respiratory syndrome coronavirus 2
  REGION 1..12: note = Table B: HLA-DQA1*02:01-B1*03:03L
GPEHSLAEYHNE

SEQ ID NO: 26453 - protein, 14 aa, Severe acute respiratory syndrome coronavirus 2
  REGION 1..14: note = Table B: HLA-DQA1*02:01-B1*03:03L
SEGLNDNLLEILQK

SEQ ID NO: 26454 - protein, 11 aa, Severe acute respiratory syndrome coronavirus 2
  REGION 1..11: note = Table B: HLA-DQA1*02:01-B1*03:03L HLA-DRB1*15:03L
NFKVTKGKAKK

SEQ ID NO: 26455 - protein, 11 aa, Severe acute respiratory syndrome coronavirus 2
  REGION 1..11: note = Table B: HLA-DQA1*02:01-B1*03:03L HLA-DRB1*15:03L
FKVTKGKAKKG

SEQ ID NO: 26456 - protein, 11 aa, Severe acute respiratory syndrome coronavirus 2
  REGION 1..11: note = Table B: HLA-DQA1*02:01-B1*03:03L
LEEKFKEGVEF

SEQ ID NO: 26457 - protein, 11 aa, Severe acute respiratory syndrome coronavirus 2
  REGION 1..11: note = Table B: HLA-DQA1*02:01-B1*03:03L
ALNLGETFVTH

SEQ ID NO: 26458 - protein, 11 aa, Severe acute respiratory syndrome coronavirus 2
  REGION 1..11: note = Table B: HLA-DQA1*02:01-B1*03:03L
TGLLMPLKAPK

SEQ ID NO: 26459 - protein, 13 aa, Severe acute respiratory syndrome coronavirus 2
  REGION 1..13: note = Table B: HLA-DQA1*02:01-B1*03:03L
SEAVEAPLVGTPV

SEQ ID NO: 26460 - protein, 11 aa, Severe acute respiratory syndrome coronavirus 2
  REGION 1..11: note = Table B: HLA-DQA1*02:01-B1*03:03L
EQKIAEIPKEE

SEQ ID NO: 26461 - protein, 14 aa, Severe acute respiratory syndrome coronavirus 2
  REGION 1..14: note = Table B: HLA-DQA1*02:01-B1*03:03L
RKVPTDNYITTYPG

SEQ ID NO: 26462 - protein, 13 aa, Severe acute respiratory syndrome coronavirus 2
  REGION 1..13: note = Table B: HLA-DQA1*02:01-B1*03:03L
RKYKGIKIQEGVV

SEQ ID NO: 26463 - protein, 15 aa, Severe acute respiratory syndrome coronavirus 2
  REGION 1..15: note = Table B: HLA-DQA1*02:01-B1*03:03L
LKRGDKSVYYTSNPT

SEQ ID NO: 26464 - protein, 10 aa, Severe acute respiratory syndrome coronavirus 2
  REGION 1..10: note = Table B: HLA-DQA1*02:01-B1*03:03L
PHNSHEGKTF

SEQ ID NO: 26465 - protein, 10 aa, Severe acute respiratory syndrome coronavirus 2
  REGION 1..10: note = Table B: HLA-DQA1*02:01-B1*03:03L
HNSHEGKTFY

SEQ ID NO: 26466 - protein, 10 aa, Severe acute respiratory syndrome coronavirus 2
  REGION 1..10: note = Table B: HLA-DQA1*02:01-B1*03:03L
MSALNHTKKW

SEQ ID NO: 26467 - protein, 12 aa, Severe acute respiratory syndrome coronavirus 2
  REGION 1..12: note = Table B: HLA-DQA1*02:01-B1*03:03L
SAPPAQYELKHG

SEQ ID NO: 26468 - protein, 12 aa, Severe acute respiratory syndrome coronavirus 2
  REGION 1..12: note = Table B: HLA-DQA1*02:01-B1*03:03L
TKSSEYKGPITD

SEQ ID NO: 26469 - protein, 10 aa, Severe acute respiratory syndrome coronavirus 2
  REGION 1..10: note = Table B: HLA-DQA1*02:01-B1*03:03L
GLAAVNSVPW

SEQ ID NO: 26470 - protein, 12 aa, Severe acute respiratory syndrome coronavirus 2
  REGION 1..12: note = Table B: HLA-DQA1*02:01-B1*03:03L
TTTNIVTRCLNR

SEQ ID NO: 26471 - protein, 10 aa, Severe acute respiratory syndrome coronavirus 2
  REGION 1..10: note = Table B: HLA-DQA1*02:01-B1*03:03L
KNTVKSVGKF

SEQ ID NO: 26472 - protein, 13 aa, Severe acute respiratory syndrome coronavirus 2
  REGION 1..13: note = Table B: HLA-DQA1*02:01-B1*03:03L
FDGKSKCEESSAK

SEQ ID NO: 26473 - protein, 16 aa, Severe acute respiratory syndrome coronavirus 2
  REGION 1..16: note = Table B: HLA-DQA1*02:01-B1*03:03L
DVETKDVVECLKLSHQ

SEQ ID NO: 26474 - protein, 12 aa, Severe acute respiratory syndrome coronavirus 2
  REGION 1..12: note = Table B: HLA-DQA1*02:01-B1*03:03L
DLGACIDCSARH

SEQ ID NO: 26475 - protein, 11 aa, Severe acute respiratory syndrome coronavirus 2
  REGION 1..11: note = Table B: HLA-DQA1*02:01-B1*03:03L
TRQVVNVVTTK

SEQ ID NO: 26476 - protein, 12 aa, Severe acute respiratory syndrome coronavirus 2
  REGION 1..12: note = Table B: HLA-DQA1*02:01-B1*03:03L
SQRGGSYTNDKA

SEQ ID NO: 26477 - protein, 10 aa, Severe acute respiratory syndrome coronavirus 2
  REGION 1..10: note = Table B: HLA-DQA1*02:01-B1*03:03L
PLIAAVITRE

SEQ ID NO: 26478 - protein, 12 aa, Severe acute respiratory syndrome coronavirus 2
  REGION 1..12: note = Table B: HLA-DQA1*02:01-B1*03:03L
REVGFVVPGLPG

SEQ ID NO: 26479 - protein, 11 aa, Severe acute respiratory syndrome coronavirus 2
  REGION 1..11: note = Table B: HLA-DQA1*02:01-B1*03:03L
DASGKPVPYCY

SEQ ID NO: 26480 - protein, 10 aa, Severe acute respiratory syndrome coronavirus 2
  REGION 1..10: note = Table B: HLA-DQA1*02:01-B1*03:03L
MRFRRAFGEY

SEQ ID NO: 26481 - protein, 13 aa, Severe acute respiratory syndrome coronavirus 2
  REGION 1..13: note = Table B: HLA-DQA1*02:01-B1*03:03L
TSEDMLNPNYEDL

SEQ ID NO: 26482 - protein, 11 aa, Severe acute respiratory syndrome coronavirus 2
  REGION 1..11: note = Table B: HLA-DQA1*02:01-B1*03:03L
NPNYEDLLIRK

SEQ ID NO: 26483 - protein, 11 aa, Severe acute respiratory syndrome coronavirus 2
  REGION 1..11: note = Table B: HLA-DQA1*02:01-B1*03:03L
MPASWVMRIMT

SEQ ID NO: 26484 - protein, 11 aa, Severe acute respiratory syndrome coronavirus 2
  REGION 1..11: note = Table B: HLA-DQA1*02:01-B1*03:03L
LLPPKNSIDAF

SEQ ID NO: 26485 - protein, 11 aa, Severe acute respiratory syndrome coronavirus 2
  REGION 1..11: note = Table B: HLA-DQA1*02:01-B1*03:03L
NSIDAFKLNIK

SEQ ID NO: 26486 - protein, 13 aa, Severe acute respiratory syndrome coronavirus 2
  REGION 1..13: note = Table B: HLA-DQA1*02:01-B1*03:03L
AIASEFSSLPSYA

SEQ ID NO: 26487 - protein, 13 aa, Severe acute respiratory syndrome coronavirus 2
  REGION 1..13: note = Table B: HLA-DQA1*02:01-B1*03:03L
SFLNRVCGVSAAR

SEQ ID NO: 26488 - protein, 15 aa, Severe acute respiratory syndrome coronavirus 2
  REGION 1..15: note = Table B: HLA-DQA1*02:01-B1*03:03L
ARLTPCGTGTSTDVV

SEQ ID NO: 26489 - protein, 16 aa, Severe acute respiratory syndrome coronavirus 2
  REGION 1..16: note = Table B: HLA-DQA1*02:01-B1*03:03L
VYALRHFDEGNCDTLK

SEQ ID NO: 26490 - protein, 15 aa, Severe acute respiratory syndrome coronavirus 2
  REGION 1..15: note = Table B: HLA-DQA1*02:01-B1*03:03L
ALRHFDEGNCDTLKE

SEQ ID NO: 26491 - protein, 11 aa, Severe acute respiratory syndrome coronavirus 2
  REGION 1..11: note = Table B: HLA-DQA1*02:01-B1*03:03L
FPPTSFGPLVR

SEQ ID NO: 26492 - protein, 10 aa, Severe acute respiratory syndrome coronavirus 2
  REGION 1..10: note = Table B: HLA-DQA1*02:01-B1*03:03L
VNLHSSRLSF

SEQ ID NO: 26493 - protein, 10 aa, Severe acute respiratory syndrome coronavirus 2
  REGION 1..10: note = Table B: HLA-DQA1*02:01-B1*03:03L
VKPGNFNKDF

SEQ ID NO: 26494 - protein, 13 aa, Severe acute respiratory syndrome coronavirus 2
  REGION 1..13: note = Table B: HLA-DQA1*02:01-B1*03:03L
VENPHLMGWDYPK

SEQ ID NO: 26495 - protein, 12 aa, Severe acute respiratory syndrome coronavirus 2
  REGION 1..12: note = Table B: HLA-DQA1*02:01-B1*03:03L
ADVFHLYLQYIR

SEQ ID NO: 26496 - protein, 10 aa, Severe acute respiratory syndrome coronavirus 2
  REGION 1..10: note = Table B: HLA-DQA1*02:01-B1*03:03L
NTSRYWEPEF

SEQ ID NO: 26497 - protein, 10 aa, Severe acute respiratory syndrome coronavirus 2
  REGION 1..10: note = Table B: HLA-DQA1*02:01-B1*03:03L
HVISTSHKLV

SEQ ID NO: 26498 - protein, 10 aa, Severe acute respiratory syndrome coronavirus 2
  REGION 1..10: note = Table B: HLA-DQA1*02:01-B1*03:03L
HKLVLSVNPY

SEQ ID NO: 26499 - protein, 11 aa, Severe acute respiratory syndrome coronavirus 2
  REGION 1..11: note = Table B: HLA-DQA1*02:01-B1*03:03L
FKLSYGIATVR

SEQ ID NO: 26500 - protein, 10 aa, Severe acute respiratory syndrome coronavirus 2
  REGION 1..10: note = Table B: HLA-DQA1*02:01-B1*03:03L
SKVQIGEYTF

SEQ ID NO: 26501 - protein, 11 aa, Severe acute respiratory syndrome coronavirus 2
  REGION 1..11: note = Table B: HLA-DQA1*02:01-B1*03:03L
LQGPPGTGKSH

SEQ ID NO: 26502 - protein, 11 aa, Severe acute respiratory syndrome coronavirus 2
  REGION 1..11: note = Table B: HLA-DQA1*02:01-B1*03:03L
SHAAVDALCEK

SEQ ID NO: 26503 - protein, 10 aa, Severe acute respiratory syndrome coronavirus 2
  REGION 1..10: note = Table B: HLA-DQA1*02:01-B1*03:03L
ARLRAKHYVY

SEQ ID NO: 26504 - protein, 13 aa, Severe acute respiratory syndrome coronavirus 2
  REGION 1..13: note = Table B: HLA-DQA1*02:01-B1*03:03L
NSVCRLMKTIGPD

SEQ ID NO: 26505 - protein, 11 aa, Severe acute respiratory syndrome coronavirus 2
  REGION 1..11: note = Table B: HLA-DQA1*02:01-B1*03:03L
PAEIVDTVSAL

SEQ ID NO: 26506 - protein, 10 aa, Severe acute respiratory syndrome coronavirus 2
  REGION 1..10: note = Table B: HLA-DQA1*02:01-B1*03:03L
RNPAWRKAVF

SEQ ID NO: 26507 - protein, 11 aa, Severe acute respiratory syndrome coronavirus 2
  REGION 1..11: note = Table B: HLA-DQA1*02:01-B1*03:03L
TAHSCNVNRFN

SEQ ID NO: 26508 - protein, 15 aa, Severe acute respiratory syndrome coronavirus 2
  REGION 1..15: note = Table B: HLA-DQA1*02:01-B1*03:03L
TRAKVGILCIMSDRD

SEQ ID NO: 26509 - protein, 15 aa, Severe acute respiratory syndrome coronavirus 2
  REGION 1..15: note = Table B: HLA-DQA1*02:01-B1*03:03L
FKTEGLCVDIPGIPK

SEQ ID NO: 26510 - protein, 11 aa, Severe acute respiratory syndrome coronavirus 2
  REGION 1..11: note = Table B: HLA-DQA1*02:01-B1*03:03L
VDTPNNTDFSR

SEQ ID NO: 26511 - protein, 10 aa, Severe acute respiratory syndrome coronavirus 2
  REGION 1..10: note = Table B: HLA-DQA1*02:01-B1*03:03L
LKNLSDRVVF

SEQ ID NO: 26512 - protein, 13 aa, Severe acute respiratory syndrome coronavirus 2
  REGION 1..13: note = Table B: HLA-DQA1*02:01-B1*03:03L
YPANSIVCRFDTR

SEQ ID NO: 26513 - protein, 10 aa, Severe acute respiratory syndrome coronavirus 2
  REGION 1..10: note = Table B: HLA-DQA1*02:01-B1*03:03L
AVCRHHANEY

SEQ ID NO: 26514 - protein, 11 aa, Severe acute respiratory syndrome coronavirus 2
  REGION 1..11: note = Table B: HLA-DQA1*02:01-B1*03:03L
QGEVPVSIINN

SEQ ID NO: 26515 - protein, 11 aa, Severe acute respiratory syndrome coronavirus 2
  REGION 1..11: note = Table B: HLA-DQA1*02:01-B1*03:03L
LQPSVGPKQAS

SEQ ID NO: 26516 - protein, 12 aa, Severe acute respiratory syndrome coronavirus 2
  REGION 1..12: note = Table B: HLA-DQA1*02:01-B1*03:03L
KKVDGVVQQLPE

SEQ ID NO: 26517 - protein, 12 aa, Severe acute respiratory syndrome coronavirus 2
  REGION 1..12: note = Table B: HLA-DQA1*02:01-B1*03:03L
TQSRNLQEFKPR

SEQ ID NO: 26518 - protein, 13 aa, Severe acute respiratory syndrome coronavirus 2
  REGION 1..13: note = Table B: HLA-DQA1*02:01-B1*03:03L
LLEKCDLQNYGDS

SEQ ID NO: 26519 - protein, 11 aa, Severe acute respiratory syndrome coronavirus 2
  REGION 1..11: note = Table B: HLA-DQA1*02:01-B1*03:03L
ATLPKGIMMNV

SEQ ID NO: 26520 - protein, 12 aa, Severe acute respiratory syndrome coronavirus 2
  REGION 1..12: note = Table B: HLA-DQA1*02:01-B1*03:03L
PKGIMMNVAKYT

SEQ ID NO: 26521 - protein, 10 aa, Severe acute respiratory syndrome coronavirus 2
  REGION 1..10: note = Table B: HLA-DQA1*02:01-B1*03:03L
TLAVPYNMRV

SEQ ID NO: 26522 - protein, 12 aa, Severe acute respiratory syndrome coronavirus 2
  REGION 1..12: note = Table B: HLA-DQA1*02:01-B1*03:03L
KENDSKEGFFTY

SEQ ID NO: 26523 - protein, 10 aa, Severe acute respiratory syndrome coronavirus 2
  REGION 1..10: note = Table B: HLA-DQA1*02:01-B1*03:03L
SFTRGVYYPD

SEQ ID NO: 26524 - protein, 11 aa, Severe acute respiratory syndrome coronavirus 2
  REGION 1..11: note = Table B: HLA-DQA1*02:01-B1*03:03L
IHVSGTNGTKR

SEQ ID NO: 26525 - protein, 10 aa, Severe acute respiratory syndrome coronavirus 2
  REGION 1..10: note = Table B: HLA-DQA1*02:01-B1*03:03L
VSGTNGTKRF

SEQ ID NO: 26526 - protein, 12 aa, Severe acute respiratory syndrome coronavirus 2
  REGION 1..12: note = Table B: HLA-DQA1*02:01-B1*03:03L HLA-DRB1*15:03L
TRFQTLLALHRS

SEQ ID NO: 26527 - protein, 11 aa, Severe acute respiratory syndrome coronavirus 2
  REGION 1..11: note = Table B: HLA-DQA1*02:01-B1*03:03L
TRFASVYAWNR

SEQ ID NO: 26528 - protein, 12 aa, Severe acute respiratory syndrome coronavirus 2
  REGION 1..12: note = Table B: HLA-DQA1*02:01-B1*03:03L
PVAIHADQLTPT

SEQ ID NO: 26529 - protein, 14 aa, Severe acute respiratory syndrome coronavirus 2
  REGION 1..14: note = Table B: HLA-DQA1*02:01-B1*03:03L
EHVNNSYECDIPIG

SEQ ID NO: 26530 - protein, 11 aa, Severe acute respiratory syndrome coronavirus 2
  REGION 1..11: note = Table B: HLA-DQA1*02:01-B1*03:03L
IGVTQNVLYEN

SEQ ID NO: 26531 - protein, 11 aa, Severe acute respiratory syndrome coronavirus 2
  REGION 1..11: note = Table B: HLA-DQA1*02:01-B1*03:03L
MSECVLGQSKR

SEQ ID NO: 26532 - protein, 11 aa, Severe acute respiratory syndrome coronavirus 2
  REGION 1..11: note = Table B: HLA-DQA1*02:01-B1*03:03L
RSMWSFNPETN

SEQ ID NO: 26533 - protein, 11 aa, Severe acute respiratory syndrome coronavirus 2
  REGION 1..11: note = Table B: HLA-DQA1*02:01-B1*03:03L
VPLHGTILTRP

SEQ ID NO: 26534 - protein, 10 aa, Severe acute respiratory syndrome coronavirus 2
  REGION 1..10: note = Table B: HLA-DQA1*02:01-B1*03:03L
AYSRYRIGNY

SEQ ID NO: 26535 - protein, 12 aa, Severe acute respiratory syndrome coronavirus 2
  REGION 1..12: note = Table B: HLA-DQA1*02:01-B1*03:03L
STGSNQNGERSG

SEQ ID NO: 26536 - protein, 10 aa, Severe acute respiratory syndrome coronavirus 2
  REGION 1..10: note = Table B: HLA-DQA1*02:01-B1*03:03L
GKMKDLSPRW

SEQ ID NO: 26537 - protein, 12 aa, Severe acute respiratory syndrome coronavirus 2
  REGION 1..12: note = Table B: HLA-DQA1*02:01-B1*03:03L
TLPKGFYAEGSR

SEQ ID NO: 26538 - protein, 12 aa, Severe acute respiratory syndrome coronavirus 2
  REGION 1..12: note = Table B: HLA-DQA1*02:01-B1*03:03L
LPKGFYAEGSRG

SEQ ID NO: 26539 - protein, 12 aa, Severe acute respiratory syndrome coronavirus 2
  REGION 1..12: note = Table B: HLA-DQA1*02:01-B1*03:03L
GSQASSRSSSRS

SEQ ID NO: 26540 - protein, 12 aa, Severe acute respiratory syndrome coronavirus 2
  REGION 1..12: note = Table B: HLA-DQA1*02:01-B1*03:03L
GTSPARMAGNGG

SEQ ID NO: 26541 - protein, 10 aa, Severe acute respiratory syndrome coronavirus 2
  REGION 1..10: note = Table B: HLA-DQA1*02:01-B1*03:03L
RTATKAYNVT

SEQ ID NO: 26542 - protein, 11 aa, Severe acute respiratory syndrome coronavirus 2
  REGION 1..11: note = Table B: HLA-DQA1*02:01-B1*03:03L
ATKAYNVTQAF

SEQ ID NO: 26543 - protein, 13 aa, Severe acute respiratory syndrome coronavirus 2
  REGION 1..13: note = Table B: HLA-DQA1*02:01-B1*03:03L
RGPEQTQGNFGDQ

SEQ ID NO: 26544 - protein, 10 aa, Severe acute respiratory syndrome coronavirus 2
  REGION 1..10: note = Table B: HLA-DQA1*02:01-B1*03:03L
IKLDDKDPNF

SEQ ID NO: 26545 - protein, 15 aa, Severe acute respiratory syndrome coronavirus 2
  REGION 1..15: note = Table B: HLA-DRB1*15:01L
ITGGVVQLTSQWLTN

SEQ ID NO: 26546 - protein, 15 aa, Severe acute respiratory syndrome coronavirus 2
  REGION 1..15: note = Table B: HLA-DRB1*15:01L
VKPTVVVNAANVYLK

SEQ ID NO: 26547 - protein, 16 aa, Severe acute respiratory syndrome coronavirus 2
  REGION 1..16: note = Table B: HLA-DRB1*15:01L
VAGALNKATNNAMQVE

SEQ ID NO: 26548 - protein, 15 aa, Severe acute respiratory syndrome coronavirus 2
  REGION 1..15: note = Table B: HLA-DRB1*15:01L
VSSFLEMKSEKQVEQ

SEQ ID NO: 26549 - protein, 14 aa, Severe acute respiratory syndrome coronavirus 2
  REGION 1..14: note = Table B: HLA-DRB1*15:01L
QLFFSYFAVHFISN

SEQ ID NO: 26550 - protein, 14 aa, Severe acute respiratory syndrome coronavirus 2
  REGION 1..14: note = Table B: HLA-DRB1*15:01L
EVAVKMFDAYVNTF

SEQ ID NO: 26551 - protein, 16 aa, Severe acute respiratory syndrome coronavirus 2
  REGION 1..16: note = Table B: HLA-DRB1*15:01L
VAAIFYLITPVHVMSK

SEQ ID NO: 26552 - protein, 15 aa, Severe acute respiratory syndrome coronavirus 2
  REGION 1..15: note = Table B: HLA-DRB1*15:01L
TPVYSFLPGVYSVIY

SEQ ID NO: 26553 - protein, 14 aa, Severe acute respiratory syndrome coronavirus 2
  REGION 1..14: note = Table B: HLA-DRB1*15:01L
SDVLLPLTQYNRYL

SEQ ID NO: 26554 - protein, 16 aa, Severe acute respiratory syndrome coronavirus 2
  REGION 1..16: note = Table B: HLA-DRB1*15:01L
VVLLILMTARTVYDDG

SEQ ID NO: 26555 - protein, 16 aa, Severe acute respiratory syndrome coronavirus 2
  REGION 1..16: note = Table B: HLA-DRB1*15:01L
AAKAYKDYLASGGQPI

SEQ ID NO: 26556 - protein, 15 aa, Severe acute respiratory syndrome coronavirus 2
  REGION 1..15: note = Table B: HLA-DRB1*15:01L
DFYDFAVSKGFFKEG

SEQ ID NO: 26557 - protein, 16 aa, Severe acute respiratory syndrome coronavirus 2
  REGION 1..16: note = Table B: HLA-DRB1*15:01L
YDYYRYNLPTMCDIRQ

SEQ ID NO: 26558 - protein, 13 aa, Severe acute respiratory syndrome coronavirus 2
  REGION 1..13: note = Table B: HLA-DRB1*15:01L
VASIKNFKSVLYY

SEQ ID NO: 26559 - protein, 16 aa, Severe acute respiratory syndrome coronavirus 2
  REGION 1..16: note = Table B: HLA-DRB1*15:01L
PAEIVDTVSALVYDNK

SEQ ID NO: 26560 - protein, 13 aa, Severe acute respiratory syndrome coronavirus 2
  REGION 1..13: note = Table B: HLA-DRB1*15:01L
ANEYRLYLDAYNM

SEQ ID NO: 26561 - protein, 16 aa, Severe acute respiratory syndrome coronavirus 2
  REGION 1..16: note = Table B: HLA-DRB1*15:01L
PVPEVKILNNLGVDIA

SEQ ID NO: 26562 - protein, 15 aa, Severe acute respiratory syndrome coronavirus 2
  REGION 1..15: note = Table B: HLA-DRB1*15:01L
DDFVEIIKSQDLSVV

SEQ ID NO: 26563 - protein, 14 aa, Severe acute respiratory syndrome coronavirus 2
  REGION 1..14: note = Table B: HLA-DRB1*15:01L
GAAAYYVGYLQPRT

SEQ ID NO: 26564 - protein, 15 aa, Severe acute respiratory syndrome coronavirus 2
  REGION 1..15: note = Table B: HLA-DRB1*15:01L
DYSVLYNSASFSTFK

SEQ ID NO: 26565 - protein, 13 aa, Severe acute respiratory syndrome coronavirus 2
  REGION 1..13: note = Table B: HLA-DRB1*15:01L
ASYQTQTNSPRRA

SEQ ID NO: 26566 - protein, 14 aa, Severe acute respiratory syndrome coronavirus 2
  REGION 1..14: note = Table B: HLA-DRB1*15:01L
DVVIGIVNNTVYDP

SEQ ID NO: 26567 - protein, 15 aa, Severe acute respiratory syndrome coronavirus 2
  REGION 1..15: note = Table B: HLA-DRB1*15:01L
VALLAVFQSASKIIT

SEQ ID NO: 26568 - protein, 15 aa, Severe acute respiratory syndrome coronavirus 2
  REGION 1..15: note = Table B: HLA-DRB1*15:01L
KHIDAYKTFPPTEPK

SEQ ID NO: 26569 - protein, 13 aa, Severe acute respiratory syndrome coronavirus 2
  REGION 1..13: note = Table B: HLA-DRB1*15:03L
SLVPGFNEKTHVQ

SEQ ID NO: 26570 - protein, 15 aa, Severe acute respiratory syndrome coronavirus 2
  REGION 1..15: note = Table B: HLA-DRB1*15:03L
QPYVFIKRSDARTAP

SEQ ID NO: 26571 - protein, 14 aa, Severe acute respiratory syndrome coronavirus 2
  REGION 1..14: note = Table B: HLA-DRB1*15:03L
HVMVELVAELEGIQ

SEQ ID NO: 26572 - protein, 16 aa, Severe acute respiratory syndrome coronavirus 2
  REGION 1..16: note = Table B: HLA-DRB1*15:03L
ADLKSFDLGDELGTDP

SEQ ID NO: 26573 - protein, 13 aa, Severe acute respiratory syndrome coronavirus 2
  REGION 1..13: note = Table B: HLA-DRB1*15:03L
KKKLDGFMGRIRS

SEQ ID NO: 26574 - protein, 12 aa, Severe acute respiratory syndrome coronavirus 2
  REGION 1..12: note = Table B: HLA-DRB1*15:03L
HSLAEYHNESGL

SEQ ID NO: 26575 - protein, 16 aa, Severe acute respiratory syndrome coronavirus 2
  REGION 1..16: note = Table B: HLA-DRB1*15:03L
VFSYVGCHNKCAYWVP

SEQ ID NO: 26576 - protein, 13 aa, Severe acute respiratory syndrome coronavirus 2
  REGION 1..13: note = Table B: HLA-DRB1*15:03L
EILQKEKVNINIV

SEQ ID NO: 26577 - protein, 11 aa, Severe acute respiratory syndrome coronavirus 2
  REGION 1..11: note = Table B: HLA-DRB1*15:03L
VNINIVGDFKL

SEQ ID NO: 26578 - protein, 11 aa, Severe acute respiratory syndrome coronavirus 2
  REGION 1..11: note = Table B: HLA-DRB1*15:03L
DFKLNEEIAII

SEQ ID NO: 26579 - protein, 12 aa, Severe acute respiratory syndrome coronavirus 2
  REGION 1..12: note = Table B: HLA-DRB1*15:03L
GISQYSLRLIDA

SEQ ID NO: 26580 - protein, 12 aa, Severe acute respiratory syndrome coronavirus 2
  REGION 1..12: note = Table B: HLA-DRB1*15:03L
EIVKFISTCACE

SEQ ID NO: 26581 - protein, 13 aa, Severe acute respiratory syndrome coronavirus 2
  REGION 1..13: note = Table B: HLA-DRB1*15:03L
KFLALCADSIIIG

SEQ ID NO: 26582 - protein, 12 aa, Severe acute respiratory syndrome coronavirus 2
  REGION 1..12: note = Table B: HLA-DRB1*15:03L
AKLKALNLGETF

SEQ ID NO: 26583 - protein, 12 aa, Severe acute respiratory syndrome coronavirus 2
  REGION 1..12: note = Table B: HLA-DRB1*15:03L
KEIIFLEGETLP

SEQ ID NO: 26584 - protein, 16 aa, Severe acute respiratory syndrome coronavirus 2
  REGION 1..16: note = Table B: HLA-DRB1*15:03L
TPVCINGLMLLEIKDT

SEQ ID NO: 26585 - protein, 12 aa, Severe acute respiratory syndrome coronavirus 2
  REGION 1..12: note = Table B: HLA-DRB1*15:03L
MVTNNTFTLKGG

SEQ ID NO: 26586 - protein, 11 aa, Severe acute respiratory syndrome coronavirus 2
  REGION 1..11: note = Table B: HLA-DRB1*15:03L
DEWSMATYYLF

SEQ ID NO: 26587 - protein, 15 aa, Severe acute respiratory syndrome coronavirus 2
  REGION 1..15: note = Table B: HLA-DRB1*15:03L
SAALQPEEEQEEDWL

SEQ ID NO: 26588 - protein, 12 aa, Severe acute respiratory syndrome coronavirus 2
  REGION 1..12: note = Table B: HLA-DRB1*15:03L
VYLKHGGGVAGA

SEQ ID NO: 26589 - protein, 12 aa, Severe acute respiratory syndrome coronavirus 2
  REGION 1..12: note = Table B: HLA-DRB1*15:03L
VLLAPLLSAGIF

SEQ ID NO: 26590 - protein, 14 aa, Severe acute respiratory syndrome coronavirus 2
  REGION 1..14: note = Table B: HLA-DRB1*15:03L
TVLKKCKSAFYILP

SEQ ID NO: 26591 - protein, 13 aa, Severe acute respiratory syndrome coronavirus 2
  REGION 1..13: note = Table B: HLA-DRB1*15:03L
ILPSIISNEKQEI

SEQ ID NO: 26592 - protein, 14 aa, Severe acute respiratory syndrome coronavirus 2
  REGION 1..14: note = Table B: HLA-DRB1*15:03L
WNLREMLAHAEETR

SEQ ID NO: 26593 - protein, 16 aa, Severe acute respiratory syndrome coronavirus 2
  REGION 1..16: note = Table B: HLA-DRB1*15:03L
TRKLMPVCVETKAIVS

SEQ ID NO: 26594 - protein, 12 aa, Severe acute respiratory syndrome coronavirus 2
  REGION 1..12: note = Table B: HLA-DRB1*15:03L
DAVTAYNGYLTS

SEQ ID NO: 26595 - protein, 13 aa, Severe acute respiratory syndrome coronavirus 2
  REGION 1..13: note = Table B: HLA-DRB1*15:03L
FLGRYMSALNHTK

SEQ ID NO: 26596 - protein, 12 aa, Severe acute respiratory syndrome coronavirus 2
  REGION 1..12: note = Table B: HLA-DRB1*15:03L
TLYCIDGALLTK

SEQ ID NO: 26597 - protein, 14 aa, Severe acute respiratory syndrome coronavirus 2
  REGION 1..14: note = Table B: HLA-DRB1*15:03L
LYCIDGALLTKSSE

SEQ ID NO: 26598 - protein, 14 aa, Severe acute respiratory syndrome coronavirus 2
  REGION 1..14: note = Table B: HLA-DRB1*15:03L
KPNELSRVLGLKTL

SEQ ID NO: 26599 - protein, 14 aa, Severe acute respiratory syndrome coronavirus 2
  REGION 1..14: note = Table B: HLA-DRB1*15:03L
NIVTRCLNRVCTNY

SEQ ID NO: 26600 - protein, 10 aa, Severe acute respiratory syndrome coronavirus 2
  REGION 1..10: note = Table B: HLA-DRB1*15:03L
SKLINIIIWF

SEQ ID NO: 26601 - protein, 14 aa, Severe acute respiratory syndrome coronavirus 2
  REGION 1..14: note = Table B: HLA-DRB1*15:03L
MPSYCTGYREGYLN

SEQ ID NO: 26602 - protein, 11 aa, Severe acute respiratory syndrome coronavirus 2
  REGION 1..11: note = Table B: HLA-DRB1*15:03L
RMYIFFASFYY

SEQ ID NO: 26603 - protein, 12 aa, Severe acute respiratory syndrome coronavirus 2
  REGION 1..12: note = Table B: HLA-DRB1*15:03L
YIFFASFYYVWK

SEQ ID NO: 26604 - protein, 13 aa, Severe acute respiratory syndrome coronavirus 2
  REGION 1..13: note = Table B: HLA-DRB1*15:03L
IFFASFYYVWKSY

SEQ ID NO: 26605 - protein, 14 aa, Severe acute respiratory syndrome coronavirus 2
  REGION 1..14: note = Table B: HLA-DRB1*15:03L
VHVVDGCNSSTCMM

SEQ ID NO: 26606 - protein, 15 aa, Severe acute respiratory syndrome coronavirus 2
  REGION 1..15: note = Table B: HLA-DRB1*15:03L
GFCKLHNWNCVNCDT

SEQ ID NO: 26607 - protein, 14 aa, Severe acute respiratory syndrome coronavirus 2
  REGION 1..14: note = Table B: HLA-DRB1*15:03L
SLQFKRPINPTDQS

SEQ ID NO: 26608 - protein, 12 aa, Severe acute respiratory syndrome coronavirus 2
  REGION 1..12: note = Table B: HLA-DRB1*15:03L
TLVATAEAELAK

SEQ ID NO: 26609 - protein, 14 aa, Severe acute respiratory syndrome coronavirus 2
  REGION 1..14: note = Table B: HLA-DRB1*15:03L
RQGFVDSDVETKDV

SEQ ID NO: 26610 - protein, 15 aa, Severe acute respiratory syndrome coronavirus 2
  REGION 1..15: note = Table B: HLA-DRB1*15:03L
GDSCNNYMLTYNKVE

SEQ ID NO: 26611 - protein, 10 aa, Severe acute respiratory syndrome coronavirus 2
  REGION 1..10: note = Table B: HLA-DRB1*15:03L
ALIWNVKDFM

SEQ ID NO: 26612 - protein, 10 aa, Severe acute respiratory syndrome coronavirus 2
  REGION 1..10: note = Table B: HLA-DRB1*15:03L
QLIKVTLVFL

SEQ ID NO: 26613 - protein, 11 aa, Severe acute respiratory syndrome coronavirus 2
  REGION 1..11: note = Table B: HLA-DRB1*15:03L
EIIGYKAIDGG

SEQ ID NO: 26614 - protein, 17 aa, Severe acute respiratory syndrome coronavirus 2
  REGION 1..17: note = Table B: HLA-DRB1*15:03L
DIASTDTCFANKHADFD

SEQ ID NO: 26615 - protein, 10 aa, Severe acute respiratory syndrome coronavirus 2
  REGION 1..10: note = Table B: HLA-DRB1*15:03L
SYTNDKACPL

SEQ ID NO: 26616 - protein, 15 aa, Severe acute respiratory syndrome coronavirus 2
  REGION 1..15: note = Table B: HLA-DRB1*15:03L
NDKACPLIAAVITRE

SEQ ID NO: 26617 - protein, 13 aa, Severe acute respiratory syndrome coronavirus 2
  REGION 1..13: note = Table B: HLA-DRB1*15:03L
AVGNICYTPSKLI

SEQ ID NO: 26618 - protein, 12 aa, Severe acute respiratory syndrome coronavirus 2
  REGION 1..12: note = Table B: HLA-DRB1*15:03L
VNLLTNMFTPLI

SEQ ID NO: 26619 - protein, 13 aa, Severe acute respiratory syndrome coronavirus 2
  REGION 1..13: note = Table B: HLA-DRB1*15:03L
GIVAIVVTCLAYY

SEQ ID NO: 26620 - protein, 10 aa, Severe acute respiratory syndrome coronavirus 2
  REGION 1..10: note = Table B: HLA-DRB1*15:03L
VVAFNTLLFL

SEQ ID NO: 26621 - protein, 14 aa, Severe acute respiratory syndrome coronavirus 2
  REGION 1..14: note = Table B: HLA-DRB1*15:03L
SVIYLYLTFYLTND

SEQ ID NO: 26622 - protein, 11 aa, Severe acute respiratory syndrome coronavirus 2
  REGION 1..11: note = Table B: HLA-DRB1*15:03L
LTNDVSFLAHI

SEQ ID NO: 26623 - protein, 12 aa, Severe acute respiratory syndrome coronavirus 2
  REGION 1..12: note = Table B: HLA-DRB1*15:03L
WFFSNYLKRRVV

SEQ ID NO: 26624 - protein, 12 aa, Severe acute respiratory syndrome coronavirus 2
  REGION 1..12: note = Table B: HLA-DRB1*15:03L
ALCTFLLNKEMY

SEQ ID NO: 26625 - protein, 16 aa, Severe acute respiratory syndrome coronavirus 2
  REGION 1..16: note = Table B: HLA-DRB1*15:03L
VSFCYMHHMELPTGVH

SEQ ID NO: 26626 - protein, 12 aa, Severe acute respiratory syndrome coronavirus 2
  REGION 1..12: note = Table B: HLA-DRB1*15:03L
NVLAWLYAAVIN

SEQ ID NO: 26627 - protein, 14 aa, Severe acute respiratory syndrome coronavirus 2
  REGION 1..14: note = Table B: HLA-DRB1*15:03L
LKELLQNGMNGRTI

SEQ ID NO: 26628 - protein, 14 aa, Severe acute respiratory syndrome coronavirus 2
  REGION 1..14: note = Table B: HLA-DRB1*15:03L
IAMSAFAMMFVKHK

SEQ ID NO: 26629 - protein, 13 aa, Severe acute respiratory syndrome coronavirus 2
  REGION 1..13: note = Table B: HLA-DRB1*15:03L
LKDCVMYASAVVL

SEQ ID NO: 26630 - protein, 10 aa, Severe acute respiratory syndrome coronavirus 2
  REGION 1..10: note = Table B: HLA-DRB1*15:03L
VMYASAVVLL

SEQ ID NO: 26631 - protein, 11 aa, Severe acute respiratory syndrome coronavirus 2
  REGION 1..11: note = Table B: HLA-DRB1*15:03L
CPIFFITGNTL

SEQ ID NO: 26632 - protein, 12 aa, Severe acute respiratory syndrome coronavirus 2
  REGION 1..12: note = Table B: HLA-DRB1*15:03L
FGLFCLLNRYFR

SEQ ID NO: 26633 - protein, 15 aa, Severe acute respiratory syndrome coronavirus 2
  REGION 1..15: note = Table B: HLA-DRB1*15:03L
GKPCIKVATVQSKMS

SEQ ID NO: 26634 - protein, 12 aa, Severe acute respiratory syndrome coronavirus 2
  REGION 1..12: note = Table B: HLA-DRB1*15:03L
LLSMQGAVDINK

SEQ ID NO: 26635 - protein, 12 aa, Severe acute respiratory syndrome coronavirus 2
  REGION 1..12: note = Table B: HLA-DRB1*15:03L
AVDINKLCEEML

SEQ ID NO: 26636 - protein, 12 aa, Severe acute respiratory syndrome coronavirus 2
  REGION 1..12: note = Table B: HLA-DRB1*15:03L
VDINKLCEEMLD

SEQ ID NO: 26637 - protein, 12 aa, Severe acute respiratory syndrome coronavirus 2
  REGION 1..12: note = Table B: HLA-DRB1*15:03L
MYKQARSEDKRA

SEQ ID NO: 26638 - protein, 14 aa, Severe acute respiratory syndrome coronavirus 2
  REGION 1..14: note = Table B: HLA-DRB1*15:03L
AMQTMLFTMLRKLD

SEQ ID NO: 26639 - protein, 14 aa, Severe acute respiratory syndrome coronavirus 2
  REGION 1..14: note = Table B: HLA-DRB1*15:03L
PDYNTYKNTCDGTT

SEQ ID NO: 26640 - protein, 12 aa, Severe acute respiratory syndrome coronavirus 2
  REGION 1..12: note = Table B: HLA-DRB1*15:03L
VLGSLAATVRLQ

SEQ ID NO: 26641 - protein, 13 aa, Severe acute respiratory syndrome coronavirus 2
  REGION 1..13: note = Table B: HLA-DRB1*15:03L
NSTVLSFCAFAVD

SEQ ID NO: 26642 - protein, 13 aa, Severe acute respiratory syndrome coronavirus 2
  REGION 1..13: note = Table B: HLA-DRB1*15:03L
STVLSFCAFAVDA

SEQ ID NO: 26643 - protein, 12 aa, Severe acute respiratory syndrome coronavirus 2
  REGION 1..12: note = Table B: HLA-DRB1*15:03L
RLTKYTMADLVY

SEQ ID NO: 26644 - protein, 14 aa, Severe acute respiratory syndrome coronavirus 2
  REGION 1..14: note = Table B: HLA-DRB1*15:03L
PVVDSYYSLLMPIL

SEQ ID NO: 26645 - protein, 15 aa, Severe acute respiratory syndrome coronavirus 2
  REGION 1..15: note = Table B: HLA-DRB1*15:03L
TRALTAESHVDTDLT

SEQ ID NO: 26646 - protein, 16 aa, Severe acute respiratory syndrome coronavirus 2
  REGION 1..16: note = Table B: HLA-DRB1*15:03L
VDTDLTKPYIKWDLLK

SEQ ID NO: 26647 - protein, 14 aa, Severe acute respiratory syndrome coronavirus 2
  REGION 1..14: note = Table B: HLA-DRB1*15:03L
KYDFTEERLKLFDR

SEQ ID NO: 26648 - protein, 12 aa, Severe acute respiratory syndrome coronavirus 2
  REGION 1..12: note = Table B: HLA-DRB1*15:03L
FVVSTGYHFREL

SEQ ID NO: 26649 - protein, 15 aa, Severe acute respiratory syndrome coronavirus 2
  REGION 1..15: note = Table B: HLA-DRB1*15:03L
LPTMCDIRQLLFVVE

SEQ ID NO: 26650 - protein, 14 aa, Severe acute respiratory syndrome coronavirus 2
  REGION 1..14: note = Table B: HLA-DRB1*15:03L
DGGCINANQVIVNN

SEQ ID NO: 26651 - protein, 13 aa, Severe acute respiratory syndrome coronavirus 2
  REGION 1..13: note = Table B: HLA-DRB1*15:03L
SKFYGGWHNMLKT

SEQ ID NO: 26652 - protein, 14 aa, Severe acute respiratory syndrome coronavirus 2
  REGION 1..14: note = Table B: HLA-DRB1*15:03L
KFYGGWHNMLKTVY

SEQ ID NO: 26653 - protein, 14 aa, Severe acute respiratory syndrome coronavirus 2
  REGION 1..14: note = Table B: HLA-DRB1*15:03L
GGWHNMLKTVYSDV

SEQ ID NO: 26654 - protein, 14 aa, Severe acute respiratory syndrome coronavirus 2
  REGION 1..14: note = Table B: HLA-DRB1*15:03L
PHLMGWDYPKCDRA

SEQ ID NO: 26655 - protein, 13 aa, Severe acute respiratory syndrome coronavirus 2
  REGION 1..13: note = Table B: HLA-DRB1*15:03L
VLSEMVMCGGSLY

SEQ ID NO: 26656 - protein, 15 aa, Severe acute respiratory syndrome coronavirus 2
  REGION 1..15: note = Table B: HLA-DRB1*15:03L
RLYECLYRNRDVDTD

SEQ ID NO: 26657 - protein, 10 aa, Severe acute respiratory syndrome coronavirus 2
  REGION 1..10: note = Table B: HLA-DRB1*15:03L
IKNFKSVLYY

SEQ ID NO: 26658 - protein, 16 aa, Severe acute respiratory syndrome coronavirus 2
  REGION 1..16: note = Table B: HLA-DRB1*15:03L
YQNNVFMSEAKCWTET

SEQ ID NO: 26659 - protein, 16 aa, Severe acute respiratory syndrome coronavirus 2
  REGION 1..16: note = Table B: HLA-DRB1*15:03L
HEFCSQHTMLVKQGDD

SEQ ID NO: 26660 - protein, 14 aa, Severe acute respiratory syndrome coronavirus 2
  REGION 1..14: note = Table B: HLA-DRB1*15:03L
KLVLSVNPYVCNAP

SEQ ID NO: 26661 - protein, 11 aa, Severe acute respiratory syndrome coronavirus 2
  REGION 1..11: note = Table B: HLA-DRB1*15:03L
VFGLYKNTCVG

SEQ ID NO: 26662 - protein, 12 aa, Severe acute respiratory syndrome coronavirus 2
  REGION 1..12: note = Table B: HLA-DRB1*15:03L
FGLYKNTCVGSD

SEQ ID NO: 26663 - protein, 16 aa, Severe acute respiratory syndrome coronavirus 2
  REGION 1..16: note = Table B: HLA-DRB1*15:03L
VTDFNAIATCDWTNAG

SEQ ID NO: 26664 - protein, 11 aa, Severe acute respiratory syndrome coronavirus 2
  REGION 1..11: note = Table B: HLA-DRB1*15:03L
YILANTCTERL

SEQ ID NO: 26665 - protein, 16 aa, Severe acute respiratory syndrome coronavirus 2
  REGION 1..16: note = Table B: HLA-DRB1*15:03L
SDRELHLSWEVGKPRP

SEQ ID NO: 26666 - protein, 12 aa, Severe acute respiratory syndrome coronavirus 2
  REGION 1..12: note = Table B: HLA-DRB1*15:03L
YTFEKGDYGDAV

SEQ ID NO: 26667 - protein, 12 aa, Severe acute respiratory syndrome coronavirus 2
  REGION 1..12: note = Table B: HLA-DRB1*15:03L
IGVVREFLTRNP

SEQ ID NO: 26668 - protein, 13 aa, Severe acute respiratory syndrome coronavirus 2
  REGION 1..13: note = Table B: HLA-DRB1*15:03L
FLTRNPAWRKAVF

SEQ ID NO: 26669 - protein, 16 aa, Severe acute respiratory syndrome coronavirus 2
  REGION 1..16: note = Table B: HLA-DRB1*15:03L
SQNAVASKILGLPTQT

SEQ ID NO: 26670 - protein, 11 aa, Severe acute respiratory syndrome coronavirus 2
  REGION 1..11: note = Table B: HLA-DRB1*15:03L
QVNGYPNMFIT

SEQ ID NO: 26671 - protein, 11 aa, Severe acute respiratory syndrome coronavirus 2
  REGION 1..11: note = Table B: HLA-DRB1*15:03L
MFITREEAIRH

SEQ ID NO: 26672 - protein, 14 aa, Severe acute respiratory syndrome coronavirus 2
  REGION 1..14: note = Table B: HLA-DRB1*15:03L
DTYACWHHSIGFDY

SEQ ID NO: 26673 - protein, 15 aa, Severe acute respiratory syndrome coronavirus 2
  REGION 1..15: note = Table B: HLA-DRB1*15:03L
NHDLYCQVHGNAHVA

SEQ ID NO: 26674 - protein, 14 aa, Severe acute respiratory syndrome coronavirus 2
  REGION 1..14: note = Table B: HLA-DRB1*15:03L
HMVVKAALLADKFP

SEQ ID NO: 26675 - protein, 13 aa, Severe acute respiratory syndrome coronavirus 2
  REGION 1..13: note = Table B: HLA-DRB1*15:03L
ADVEWKFYDAQPC

SEQ ID NO: 26676 - protein, 12 aa, Severe acute respiratory syndrome coronavirus 2
  REGION 1..12: note = Table B: HLA-DRB1*15:03L
KFYDAQPCSDKA

SEQ ID NO: 26677 - protein, 13 aa, Severe acute respiratory syndrome coronavirus 2
  REGION 1..13: note = Table B: HLA-DRB1*15:03L
TRVLSNLNLPGCD

SEQ ID NO: 26678 - protein, 12 aa, Severe acute respiratory syndrome coronavirus 2
  REGION 1..12: note = Table B: HLA-DRB1*15:03L
PFFYYSDSPCES

SEQ ID NO: 26679 - protein, 11 aa, Severe acute respiratory syndrome coronavirus 2
  REGION 1..11: note = Table B: HLA-DRB1*15:03L
EYRLYLDAYNM

SEQ ID NO: 26680 - protein, 10 aa, Severe acute respiratory syndrome coronavirus 2
  REGION 1..10: note = Table B: HLA-DRB1*15:03L
IKPVPEVKIL

SEQ ID NO: 26681 - protein, 13 aa, Severe acute respiratory syndrome coronavirus 2
  REGION 1..13: note = Table B: HLA-DRB1*15:03L
NLGVDIAANTVIW

SEQ ID NO: 26682 - protein, 14 aa, Severe acute respiratory syndrome coronavirus 2
  REGION 1..14: note = Table B: HLA-DRB1*15:03L
IGVCSMTDIAKKPT

SEQ ID NO: 26683 - protein, 12 aa, Severe acute respiratory syndrome coronavirus 2
  REGION 1..12: note = Table B: HLA-DRB1*15:03L
PLTVFFDGRVDG

SEQ ID NO: 26684 - protein, 16 aa, Severe acute respiratory syndrome coronavirus 2
  REGION 1..16: note = Table B: HLA-DRB1*15:03L
VGPKQASLNGVTLIGE

SEQ ID NO: 26685 - protein, 13 aa, Severe acute respiratory syndrome coronavirus 2
  REGION 1..13: note = Table B: HLA-DRB1*15:03L
LNGVTLIGEAVKT

SEQ ID NO: 26686 - protein, 14 aa, Severe acute respiratory syndrome coronavirus 2
  REGION 1..14: note = Table B: HLA-DRB1*15:03L
EFKPRSQMEIDFLE

SEQ ID NO: 26687 - protein, 12 aa, Severe acute respiratory syndrome coronavirus 2
  REGION 1..12: note = Table B: HLA-DRB1*15:03L
FIERYKLEGYAF

SEQ ID NO: 26688 - protein, 13 aa, Severe acute respiratory syndrome coronavirus 2
  REGION 1..13: note = Table B: HLA-DRB1*15:03L
KDGHVETFYPKLQ

SEQ ID NO: 26689 - protein, 13 aa, Severe acute respiratory syndrome coronavirus 2
  REGION 1..13: note = Table B: HLA-DRB1*15:03L
TQLCQYLNTLTLA

SEQ ID NO: 26690 - protein, 12 aa, Severe acute respiratory syndrome coronavirus 2
  REGION 1..12: note = Table B: HLA-DRB1*15:03L
ANKWDLIISDMY

SEQ ID NO: 26691 - protein, 13 aa, Severe acute respiratory syndrome coronavirus 2
  REGION 1..13: note = Table B: HLA-DRB1*15:03L
EGFFTYICGFIQQ

SEQ ID NO: 26692 - protein, 14 aa, Severe acute respiratory syndrome coronavirus 2
  REGION 1..14: note = Table B: HLA-DRB1*15:03L
AFLIGCNYLGKPRE

SEQ ID NO: 26693 - protein, 12 aa, Severe acute respiratory syndrome coronavirus 2
  REGION 1..12: note = Table B: HLA-DRB1*15:03L
LLPLVSSQCVNL

SEQ ID NO: 26694 - protein, 12 aa, Severe acute respiratory syndrome coronavirus 2
  REGION 1..12: note = Table B: HLA-DRB1*15:03L
FSNVTWFHAIHV

SEQ ID NO: 26695 - protein, 16 aa, Severe acute respiratory syndrome coronavirus 2
  REGION 1..16: note = Table B: HLA-DRB1*15:03L
AIHVSGTNGTKRFDNP

SEQ ID NO: 26696 - protein, 12 aa, Severe acute respiratory syndrome coronavirus 2
  REGION 1..12: note = Table B: HLA-DRB1*15:03L
VFKNIDGYFKIY

SEQ ID NO: 26697 - protein, 16 aa, Severe acute respiratory syndrome coronavirus 2
  REGION 1..16: note = Table B: HLA-DRB1*15:03L
TPGDSSSGWTAGAAAY

SEQ ID NO: 26698 - protein, 14 aa, Severe acute respiratory syndrome coronavirus 2
  REGION 1..14: note = Table B: HLA-DRB1*15:03L
TAGAAAYYVGYLQP

SEQ ID NO: 26699 - protein, 13 aa, Severe acute respiratory syndrome coronavirus 2
  REGION 1..13: note = Table B: HLA-DRB1*15:03L
GAAAYYVGYLQPR

SEQ ID NO: 26700 - protein, 15 aa, Severe acute respiratory syndrome coronavirus 2
  REGION 1..15: note = Table B: HLA-DRB1*15:03L
ISNCVADYSVLYNSA

SEQ ID NO: 26701 - protein, 13 aa, Severe acute respiratory syndrome coronavirus 2
  REGION 1..13: note = Table B: HLA-DRB1*15:03L
ASFSTFKCYGVSP

SEQ ID NO: 26702 - protein, 12 aa, Severe acute respiratory syndrome coronavirus 2
  REGION 1..12: note = Table B: HLA-DRB1*15:03L
FNCYFPLQSYGF

SEQ ID NO: 26703 - protein, 14 aa, Severe acute respiratory syndrome coronavirus 2
  REGION 1..14: note = Table B: HLA-DRB1*15:03L
TEVPVAIHADQLTP

SEQ ID NO: 26704 - protein, 15 aa, Severe acute respiratory syndrome coronavirus 2
  REGION 1..15: note = Table B: HLA-DRB1*15:03L
AGICASYQTQTNSPR

SEQ ID NO: 26705 - protein, 14 aa, Severe acute respiratory syndrome coronavirus 2
  REGION 1..14: note = Table B: HLA-DRB1*15:03L
NFTISVTTEILPVS

SEQ ID NO: 26706 - protein, 15 aa, Severe acute respiratory syndrome coronavirus 2
  REGION 1..15: note = Table B: HLA-DRB1*15:03L
LPVSMTKTSVDCTMY

SEQ ID NO: 26707 - protein, 12 aa, Severe acute respiratory syndrome coronavirus 2
  REGION 1..12: note = Table B: HLA-DRB1*15:03L
PPIKDFGGFNFS

SEQ ID NO: 26708 - protein, 13 aa, Severe acute respiratory syndrome coronavirus 2
  REGION 1..13: note = Table B: HLA-DRB1*15:03L
LFNKVTLADAGFI

SEQ ID NO: 26709 - protein, 11 aa, Severe acute respiratory syndrome coronavirus 2
  REGION 1..11: note = Table B: HLA-DRB1*15:03L
KVTLADAGFIK

SEQ ID NO: 26710 - protein, 12 aa, Severe acute respiratory syndrome coronavirus 2
  REGION 1..12: note = Table B: HLA-DRB1*15:03L
GFIKQYGDCLGD

SEQ ID NO: 26711 - protein, 12 aa, Severe acute respiratory syndrome coronavirus 2
  REGION 1..12: note = Table B: HLA-DRB1*15:03L
PFAMQMAYRFNG

SEQ ID NO: 26712 - protein, 13 aa, Severe acute respiratory syndrome coronavirus 2
  REGION 1..13: note = Table B: HLA-DRB1*15:03L
MQMAYRFNGIGVT

SEQ ID NO: 26713 - protein, 13 aa, Severe acute respiratory syndrome coronavirus 2
  REGION 1..13: note = Table B: HLA-DRB1*15:03L
ALNTLVKQLSSNF

SEQ ID NO: 26714 - protein, 12 aa, Severe acute respiratory syndrome coronavirus 2
  REGION 1..12: note = Table B: HLA-DRB1*15:03L
LVKQLSSNFGAI

SEQ ID NO: 26715 - protein, 13 aa, Severe acute respiratory syndrome coronavirus 2
  REGION 1..13: note = Table B: HLA-DRB1*15:03L
ELDKYFKNHTSPD

SEQ ID NO: 26716 - protein, 13 aa, Severe acute respiratory syndrome coronavirus 2
  REGION 1..13: note = Table B: HLA-DRB1*15:03L
QKEIDRLNEVAKN

SEQ ID NO: 26717 - protein, 14 aa, Severe acute respiratory syndrome coronavirus 2
  REGION 1..14: note = Table B: HLA-DRB1*15:03L
LGFIAGLIAIVMVT

SEQ ID NO: 26718 - protein, 14 aa, Severe acute respiratory syndrome coronavirus 2
  REGION 1..14: note = Table B: HLA-DRB1*15:03L
IGTVTLKQGEIKDA

SEQ ID NO: 26719 - protein, 12 aa, Severe acute respiratory syndrome coronavirus 2
  REGION 1..12: note = Table B: HLA-DRB1*15:03L
LLAVFQSASKII

SEQ ID NO: 26720 - protein, 13 aa, Severe acute respiratory syndrome coronavirus 2
  REGION 1..13: note = Table B: HLA-DRB1*15:03L
IITLKKRWQLALS

SEQ ID NO: 26721 - protein, 13 aa, Severe acute respiratory syndrome coronavirus 2
  REGION 1..13: note = Table B: HLA-DRB1*15:03L
SKGVHFVCNLLLL

SEQ ID NO: 26722 - protein, 11 aa, Severe acute respiratory syndrome coronavirus 2
  REGION 1..11: note = Table B: HLA-DRB1*15:03L
APFLYLYALVY

SEQ ID NO: 26723 - protein, 10 aa, Severe acute respiratory syndrome coronavirus 2
  REGION 1..10: note = Table B: HLA-DRB1*15:03L
LVYFLQSINF

SEQ ID NO: 26724 - protein, 12 aa, Severe acute respiratory syndrome coronavirus 2
  REGION 1..12: note = Table B: HLA-DRB1*15:03L
SINFVRIIMRLW

SEQ ID NO: 26725 - protein, 14 aa, Severe acute respiratory syndrome coronavirus 2
  REGION 1..14: note = Table B: HLA-DRB1*15:03L
IIMRLWLCWKCRSK

SEQ ID NO: 26726 - protein, 16 aa, Severe acute respiratory syndrome coronavirus 2
  REGION 1..16: note = Table B: HLA-DRB1*15:03L
IMRLWLCWKCRSKNPL

SEQ ID NO: 26727 - protein, 14 aa, Severe acute respiratory syndrome coronavirus 2
  REGION 1..14: note = Table B: HLA-DRB1*15:03L
GVEHVTFFIYNKIV

SEQ ID NO: 26728 - protein, 13 aa, Severe acute respiratory syndrome coronavirus 2
  REGION 1..13: note = Table B: HLA-DRB1*15:03L
TIDGSSGVVNPVM

SEQ ID NO: 26729 - protein, 11 aa, Severe acute respiratory syndrome coronavirus 2
  REGION 1..11: note = Table B: HLA-DRB1*15:03L
EQWNLVIGFLF

SEQ ID NO: 26730 - protein, 10 aa, Severe acute respiratory syndrome coronavirus 2
  REGION 1..10: note = Table B: HLA-DRB1*15:03L
FLYIIKLIFL

SEQ ID NO: 26731 - protein, 13 aa, Severe acute respiratory syndrome coronavirus 2
  REGION 1..13: note = Table B: HLA-DRB1*15:03L
TRSMWSFNPETNI

SEQ ID NO: 26732 - protein, 13 aa, Severe acute respiratory syndrome coronavirus 2
  REGION 1..13: note = Table B: HLA-DRB1*15:03L
RTLSYYKLGASQR

SEQ ID NO: 26733 - protein, 14 aa, Severe acute respiratory syndrome coronavirus 2
  REGION 1..14: note = Table B: HLA-DRB1*15:03L
RYRIGNYKLNTDHS

SEQ ID NO: 26734 - protein, 14 aa, Severe acute respiratory syndrome coronavirus 2
  REGION 1..14: note = Table B: HLA-DRB1*15:03L
LGSLVVRCSFYEDF

SEQ ID NO: 26735 - protein, 13 aa, Severe acute respiratory syndrome coronavirus 2
  REGION 1..13: note = Table B: HLA-DRB1*15:03L
VVRCSFYEDFLEY

SEQ ID NO: 26736 - protein, 12 aa, Severe acute respiratory syndrome coronavirus 2
  REGION 1..12: note = Table B: HLA-DRB1*15:03L
YEDFLEYHDVRV

SEQ ID NO: 26737 - protein, 14 aa, Severe acute respiratory syndrome coronavirus 2
  REGION 1..14: note = Table B: HLA-DRB1*15:03L
QIGYYRRATRRIRG

SEQ ID NO: 26738 - protein, 15 aa, Severe acute respiratory syndrome coronavirus 2
  REGION 1..15: note = Table B: HLA-DRB1*15:03L
IGYYRRATRRIRGGD

SEQ ID NO: 26739 - protein, 18 aa, Severe acute respiratory syndrome coronavirus 2
  REGION 1..18: note = Table B: HLA-DRB1*15:03L
ATRRIRGGDGKMKDLSPR

SEQ ID NO: 26740 - protein, 14 aa, Severe acute respiratory syndrome coronavirus 2
  REGION 1..14: note = Table B: HLA-DRB1*15:03L
FPFTIYSLLLCRMN

SEQ ID NO: 26741 - protein, 8 aa, Severe acute respiratory syndrome coronavirus 2
  REGION 1..8: note = Table C
DSAEVAVK

SEQ ID NO: 26742 - protein, 8 aa, Severe acute respiratory syndrome coronavirus 2
  REGION 1..8: note = Table C
SAEVAVKM

SEQ ID NO: 26743 - protein, 8 aa, Severe acute respiratory syndrome coronavirus 2
  REGION 1..8: note = Table C
AEVAVKMF

SEQ ID NO: 26744 - protein, 8 aa, Severe acute respiratory syndrome coronavirus 2
  REGION 1..8: note = Table C
VAVKMFDA

SEQ ID NO: 26745 - protein, 8 aa, Severe acute respiratory syndrome coronavirus 2
  REGION 1..8: note = Table C
AVKMFDAY

SEQ ID NO: 26746 - protein, 8 aa, Severe acute respiratory syndrome coronavirus 2
  REGION 1..8: note = Table C
FDAYVNTF

SEQ ID NO: 26747 - protein, 8 aa, Severe acute respiratory syndrome coronavirus 2
  REGION 1..8: note = Table C
HTDFSSEI

SEQ ID NO: 26748 - protein, 8 aa, Severe acute respiratory syndrome coronavirus 2
  REGION 1..8: note = Table C
FSSEIIGY

SEQ ID NO: 26749 - protein, 8 aa, Severe acute respiratory syndrome coronavirus 2
  REGION 1..8: note = Table C
SSEIIGYK

SEQ ID NO: 26750 - protein, 8 aa, Severe acute respiratory syndrome coronavirus 2
  REGION 1..8: note = Table C
SEIIGYKA

SEQ ID NO: 26751 - protein, 8 aa, Severe acute respiratory syndrome coronavirus 2
  REGION 1..8: note = Table C
TDDNALAY

SEQ ID NO: 26752 - protein, 8 aa, Severe acute respiratory syndrome coronavirus 2
  REGION 1..8: note = Table C
DDNALAYY

SEQ ID NO: 26753 - protein, 8 aa, Severe acute respiratory syndrome coronavirus 2
  REGION 1..8: note = Table C
LAYYNTTK

SEQ ID NO: 26754 - protein, 8 aa, Severe acute respiratory syndrome coronavirus 2
  REGION 1..8: note = Table C
TDVVYRAF

SEQ ID NO: 26755 - protein, 8 aa, Severe acute respiratory syndrome coronavirus 2
  REGION 1..8: note = Table C
FDIYNDKV

SEQ ID NO: 26756 - protein, 8 aa, Severe acute respiratory syndrome coronavirus 2
  REGION 1..8: note = Table C
YNDKVAGF

SEQ ID NO: 26757 - protein, 8 aa, Severe acute respiratory syndrome coronavirus 2
  REGION 1..8: note = Table C
VAGFAKFL

SEQ ID NO: 26758 - protein, 8 aa, Severe acute respiratory syndrome coronavirus 2
  REGION 1..8: note = Table C
AGFAKFLK

SEQ ID NO: 26759 - protein, 8 aa, Severe acute respiratory syndrome coronavirus 2
  REGION 1..8: note = Table C
DVTDVTQL

SEQ ID NO: 26760 - protein, 8 aa, Severe acute respiratory syndrome coronavirus 2
  REGION 1..8: note = Table C
VTDVTQLY

SEQ ID NO: 26761 - protein, 8 aa, Severe acute respiratory syndrome coronavirus 2
  REGION 1..8: note = Table C
TDVTQLYL

SEQ ID NO: 26762 - protein, 8 aa, Severe acute respiratory syndrome coronavirus 2
  REGION 1..8: note = Table C
LYLGGMSY

SEQ ID NO: 26763 - protein, 8 aa, Severe acute respiratory syndrome coronavirus 2
  REGION 1..8: note = Table C
YLGGMSYY

SEQ ID NO: 26764 - protein, 9 aa, Severe acute respiratory syndrome coronavirus 2
  REGION 1..9: note = Table C
VGDSAEVAV

SEQ ID NO: 26765 - protein, 9 aa, Severe acute respiratory syndrome coronavirus 2
  REGION 1..9: note = Table C
DSAEVAVKM

SEQ ID NO: 26766 - protein, 9 aa, Severe acute respiratory syndrome coronavirus 2
  REGION 1..9: note = Table C
SAEVAVKMF

SEQ ID NO: 26767 - protein, 9 aa, Severe acute respiratory syndrome coronavirus 2
  REGION 1..9: note = Table C
VAVKMFDAY

SEQ ID NO: 26768 - protein, 9 aa, Severe acute respiratory syndrome coronavirus 2
  REGION 1..9: note = Table C
AVKMFDAYV

SEQ ID NO: 26769 - protein, 9 aa, Severe acute respiratory syndrome coronavirus 2
  REGION 1..9: note = Table C
KMFDAYVNT

SEQ ID NO: 26770 - protein, 9 aa, Severe acute respiratory syndrome coronavirus 2
  REGION 1..9: note = Table C
MFDAYVNTF

SEQ ID NO: 26771 - protein, 9 aa, Severe acute respiratory syndrome coronavirus 2
  REGION 1..9: note = Table C
YVNTFSSTF

SEQ ID NO: 26772 - protein, 9 aa, Severe acute respiratory syndrome coronavirus 2
  REGION 1..9: note = Table C
NTFSSTFNV

SEQ ID NO: 26773 - protein, 9 aa, Severe acute respiratory syndrome coronavirus 2
  REGION 1..9: note = Table C
HVMSKHTDF

SEQ ID NO: 26774 - protein, 9 aa, Severe acute respiratory syndrome coronavirus 2
  REGION 1..9: note = Table C
KHTDFSSEI

SEQ ID NO: 26775 - protein, 9 aa, Severe acute respiratory syndrome coronavirus 2
  REGION 1..9: note = Table C
HTDFSSEII

SEQ ID NO: 26776 - protein, 9 aa, Severe acute respiratory syndrome coronavirus 2
  REGION 1..9: note = Table C
DFSSEIIGY

SEQ ID NO: 26777 - protein, 9 aa, Severe acute respiratory syndrome coronavirus 2
  REGION 1..9: note = Table C
FSSEIIGYK

SEQ ID NO: 26778 - protein, 9 aa, Severe acute respiratory syndrome coronavirus 2
  REGION 1..9: note = Table C
SEIIGYKAI

SEQ ID NO: 26779 - protein, 9 aa, Severe acute respiratory syndrome coronavirus 2
  REGION 1..9: note = Table C
KAIDGGVTR

SEQ ID NO: 26780 - protein, 9 aa, Severe acute respiratory syndrome coronavirus 2
  REGION 1..9: note = Table C
CAAGTTQTA

SEQ ID NO: 26781 - protein, 9 aa, Severe acute respiratory syndrome coronavirus 2
  REGION 1..9: note = Table C
AAGTTQTAC

SEQ ID NO: 26782 - protein, 9 aa, Severe acute respiratory syndrome coronavirus 2
  REGION 1..9: note = Table C
TACTDDNAL

SEQ ID NO: 26783 - protein, 9 aa, Severe acute respiratory syndrome coronavirus 2
  REGION 1..9: note = Table C
CTDDNALAY

SEQ ID NO: 26784 - protein, 9 aa, Severe acute respiratory syndrome coronavirus 2
  REGION 1..9: note = Table C
TDDNALAYY

SEQ ID NO: 26785 - protein, 9 aa, Severe acute respiratory syndrome coronavirus 2
  REGION 1..9: note = Table C
ALAYYNTTK

SEQ ID NO: 26786 - protein, 9 aa, Severe acute respiratory syndrome coronavirus 2
  REGION 1..9: note = Table C
STDVVYRAF

SEQ ID NO: 26787 - protein, 9 aa, Severe acute respiratory syndrome coronavirus 2
  REGION 1..9: note = Table C
VVYRAFDIY

SEQ ID NO: 26788 - protein, 9 aa, Severe acute respiratory syndrome coronavirus 2
  REGION 1..9: note = Table C
AFDIYNDKV

SEQ ID NO: 26789 - protein, 9 aa, Severe acute respiratory syndrome coronavirus 2
  REGION 1..9: note = Table C
FDIYNDKVA

SEQ ID NO: 26790 - protein, 9 aa, Severe acute respiratory syndrome coronavirus 2
  REGION 1..9: note = Table C
IYNDKVAGF

SEQ ID NO: 26791 - protein, 9 aa, Severe acute respiratory syndrome coronavirus 2
  REGION 1..9: note = Table C
KVAGFAKFL

SEQ ID NO: 26792 - protein, 9 aa, Severe acute respiratory syndrome coronavirus 2
  REGION 1..9: note = Table C
VAGFAKFLK

SEQ ID NO: 26793 - protein, 9 aa, Severe acute respiratory syndrome coronavirus 2
  REGION 1..9: note = Table C
AGFAKFLKT

SEQ ID NO: 26794 - protein, 9 aa, Severe acute respiratory syndrome coronavirus 2
  REGION 1..9: note = Table C
DVTDVTQLY

SEQ ID NO: 26795 - protein, 9 aa, Severe acute respiratory syndrome coronavirus 2
  REGION 1..9: note = Table C
VTDVTQLYL

SEQ ID NO: 26796 - protein, 9 aa, Severe acute respiratory syndrome coronavirus 2
  REGION 1..9: note = Table C
QLYLGGMSY

SEQ ID NO: 26797 - protein, 9 aa, Severe acute respiratory syndrome coronavirus 2
  REGION 1..9: note = Table C
LYLGGMSYY

SEQ ID NO: 26798 - protein, 10 aa, Severe acute respiratory syndrome coronavirus 2
  REGION 1..10: note = Table C
VGDSAEVAVK

SEQ ID NO: 26799 - protein, 10 aa, Severe acute respiratory syndrome coronavirus 2
  REGION 1..10: note = Table C
DSAEVAVKMF

SEQ ID NO: 26800 - protein, 10 aa, Severe acute respiratory syndrome coronavirus 2
  REGION 1..10: note = Table C
AEVAVKMFDA

SEQ ID NO: 26801 - protein, 10 aa, Severe acute respiratory syndrome coronavirus 2
  REGION 1..10: note = Table C
EVAVKMFDAY

SEQ ID NO: 26802 - protein, 10 aa, Severe acute respiratory syndrome coronavirus 2
  REGION 1..10: note = Table C
KMFDAYVNTF

SEQ ID NO: 26803 - protein, 10 aa, Severe acute respiratory syndrome coronavirus 2
  REGION 1..10: note = Table C
AYVNTFSSTF

SEQ ID NO: 26804 - protein, 10 aa, Severe acute respiratory syndrome coronavirus 2
  REGION 1..10: note = Table C
KHTDFSSEII

SEQ ID NO: 26805 - protein, 10 aa, Severe acute respiratory syndrome coronavirus 2
  REGION 1..10: note = Table C
TDFSSEIIGY

SEQ ID NO: 26806 - protein, 10 aa, Severe acute respiratory syndrome coronavirus 2
  REGION 1..10: note = Table C
DFSSEIIGYK

SEQ ID NO: 26807 - protein, 10 aa, Severe acute respiratory syndrome coronavirus 2
  REGION 1..10: note = Table C
FSSEIIGYKA

SEQ ID NO: 26808 - protein, 10 aa, Severe acute respiratory syndrome coronavirus 2
  REGION 1..10: note = Table C
EIIGYKAIDG

SEQ ID NO: 26809 - protein, 10 aa, Severe acute respiratory syndrome coronavirus 2
  REGION 1..10: note = Table C
CTDDNALAYY

SEQ ID NO: 26810 - protein, 10 aa, Severe acute respiratory syndrome coronavirus 2
  REGION 1..10: note = Table C
NALAYYNTTK

SEQ ID NO: 26811 - protein, 10 aa, Severe acute respiratory syndrome coronavirus 2
  REGION 1..10: note = Table C
RAFDIYNDKV

SEQ ID NO: 26812 - protein, 10 aa, Severe acute respiratory syndrome coronavirus 2
  REGION 1..10: note = Table C
DIYNDKVAGF

SEQ ID NO: 26813 - protein, 10 aa, Severe acute respiratory syndrome coronavirus 2
  REGION 1..10: note = Table C
KVAGFAKFLK

SEQ ID NO: 26814 - protein, 10 aa, Severe acute respiratory syndrome coronavirus 2
  REGION 1..10: note = Table C
GCDVTDVTQL

SEQ ID NO: 26815 - protein, 10 aa, Severe acute respiratory syndrome coronavirus 2
  REGION 1..10: note = Table C
DVTDVTQLYL

SEQ ID NO: 26816 - protein, 10 aa, Severe acute respiratory syndrome coronavirus 2
  REGION 1..10: note = Table C
VTDVTQLYLG

SEQ ID NO: 26817 - protein, 10 aa, Severe acute respiratory syndrome coronavirus 2
  REGION 1..10: note = Table C
DVTQLYLGGM

SEQ ID NO: 26818 - protein, 10 aa, Severe acute respiratory syndrome coronavirus 2
  REGION 1..10: note = Table C
TQLYLGGMSY

SEQ ID NO: 26819 - protein, 10 aa, Severe acute respiratory syndrome coronavirus 2
  REGION 1..10: note = Table C
QLYLGGMSYY

SEQ ID NO: 26820 - protein, 11 aa, Severe acute respiratory syndrome coronavirus 2
  REGION 1..11: note = Table C
VGDSAEVAVKM

SEQ ID NO: 26821 - protein, 11 aa, Severe acute respiratory syndrome coronavirus 2
  REGION 1..11: note = Table C
AEVAVKMFDAY

SEQ ID NO: 26822 - protein, 11 aa, Severe acute respiratory syndrome coronavirus 2
  REGION 1..11: note = Table C
EVAVKMFDAYV

SEQ ID NO: 26823 - protein, 11 aa, Severe acute respiratory syndrome coronavirus 2
  REGION 1..11: note = Table C
DAYVNTFSSTF

SEQ ID NO: 26824 - protein, 11 aa, Severe acute respiratory syndrome coronavirus 2
  REGION 1..11: note = Table C
HTDFSSEIIGY

SEQ ID NO: 26825 - protein, 11 aa, Severe acute respiratory syndrome coronavirus 2
  REGION 1..11: note = Table C
TDFSSEIIGYK

SEQ ID NO: 26826 - protein, 11 aa, Severe acute respiratory syndrome coronavirus 2
  REGION 1..11: note = Table C
EIIGYKAIDGG

SEQ ID NO: 26827 - protein, 11 aa, Severe acute respiratory syndrome coronavirus 2
  REGION 1..11: note = Table C
GYKAIDGGVTR

SEQ ID NO: 26828 - protein, 11 aa, Severe acute respiratory syndrome coronavirus 2
  REGION 1..11: note = Table C
TACTDDNALAY

SEQ ID NO: 26829 - protein, 11 aa, Severe acute respiratory syndrome coronavirus 2
  REGION 1..11: note = Table C
IYNDKVAGFAK

SEQ ID NO: 26830 - protein, 11 aa, Severe acute respiratory syndrome coronavirus 2
  REGION 1..11: note = Table C
KVAGFAKFLKT

SEQ ID NO: 26831 - protein, 11 aa, Severe acute respiratory syndrome coronavirus 2
  REGION 1..11: note = Table C
GCDVTDVTQLY

SEQ ID NO: 26832 - protein, 11 aa, Severe acute respiratory syndrome coronavirus 2
  REGION 1..11: note = Table C
DVTDVTQLYLG

SEQ ID NO: 26833 - protein, 11 aa, Severe acute respiratory syndrome coronavirus 2
  REGION 1..11: note = Table C
VTQLYLGGMSY

SEQ ID NO: 26834 - protein, 11 aa, Severe acute respiratory syndrome coronavirus 2
  REGION 1..11: note = Table C
TQLYLGGMSYY

SEQ ID NO: 26835 - protein, 8 aa, Severe acute respiratory syndrome coronavirus 2
  REGION 1..8: note = Table C
LFMRIFTI

SEQ ID NO: 26836 - protein, 8 aa, Severe acute respiratory syndrome coronavirus 2
  REGION 1..8: note = Table C
RIFTIGTV

SEQ ID NO: 26837 - protein, 8 aa, Severe acute respiratory syndrome coronavirus 2
  REGION 1..8: note = Table C
FTIGTVTL

SEQ ID NO: 26838 - protein, 8 aa, Severe acute respiratory syndrome coronavirus 2
  REGION 1..8: note = Table C
TIGTVTLK

SEQ ID NO: 26839 - protein, 8 aa, Severe acute respiratory syndrome coronavirus 2
  REGION 1..8: note = Table C
VTLKQGEI

SEQ ID NO: 26840 - protein, 8 aa, Severe acute respiratory syndrome coronavirus 2
  REGION 1..8: note = Table C
GEIKDATP

SEQ ID NO: 26841 - protein, 8 aa, Severe acute respiratory syndrome coronavirus 2
  REGION 1..8: note = Table C
DATPSDFV

SEQ ID NO: 26842 - protein, 8 aa, Severe acute respiratory syndrome coronavirus 2
  REGION 1..8: note = Table C
TPSDFVRA

SEQ ID NO: 26843 - protein, 8 aa, Severe acute respiratory syndrome coronavirus 2
  REGION 1..8: note = Table C
SDFVRATA

SEQ ID NO: 26844 - protein, 8 aa, Severe acute respiratory syndrome coronavirus 2
  REGION 1..8: note = Table C
FVRATATI

SEQ ID NO: 26845 - protein, 8 aa, Severe acute respiratory syndrome coronavirus 2
  REGION 1..8: note = Table C
TATIPIQA

SEQ ID NO: 26846 - protein, 8 aa, Severe acute respiratory syndrome coronavirus 2
  REGION 1..8: note = Table C
QASLPFGW

SEQ ID NO: 26847 - protein, 8 aa, Severe acute respiratory syndrome coronavirus 2
  REGION 1..8: note = Table C
AVFQSASK

SEQ ID NO: 26848 - protein, 8 aa, Severe acute respiratory syndrome coronavirus 2
  REGION 1..8: note = Table C
VFQSASKI

SEQ ID NO: 26849 - protein, 8 aa, Severe acute respiratory syndrome coronavirus 2
  REGION 1..8: note = Table C
FQSASKII

SEQ ID NO: 26850 - protein, 8 aa, Severe acute respiratory syndrome coronavirus 2
  REGION 1..8: note = Table C
SASKIITL

SEQ ID NO: 26851 - protein, 8 aa, Severe acute respiratory syndrome coronavirus 2
  REGION 1..8: note = Table C
ASKIITLK

SEQ ID NO: 26852 - protein, 8 aa, Severe acute respiratory syndrome coronavirus 2
  REGION 1..8: note = Table C
TLKKRWQL

SEQ ID NO: 26853 - protein, 8 aa, Severe acute respiratory syndrome coronavirus 2
  REGION 1..8: note = Table C
LYLYALVY

SEQ ID NO: 26854 - protein, 8 aa, Severe acute respiratory syndrome coronavirus 2
  REGION 1..8: note = Table C
YFLQSINF

SEQ ID NO: 26855 - protein, 8 aa, Severe acute respiratory syndrome coronavirus 2
  REGION 1..8: note = Table C
FLQSINFV

SEQ ID NO: 26856 - protein, 8 aa, Severe acute respiratory syndrome coronavirus 2
  REGION 1..8: note = Table C
QSINFVRI

SEQ ID NO: 26857 - protein, 8 aa, Severe acute respiratory syndrome coronavirus 2
  REGION 1..8: note = Table C
SINFVRII

SEQ ID NO: 26858 - protein, 8 aa, Severe acute respiratory syndrome coronavirus 2
  REGION 1..8: note = Table C
DCVVLHSY

SEQ ID NO: 26859 - protein, 8 aa, Severe acute respiratory syndrome coronavirus 2
  REGION 1..8: note = Table C
SYFTSDYY

SEQ ID NO: 26860 - protein, 8 aa, Severe acute respiratory syndrome coronavirus 2
  REGION 1..8: note = Table C
TSDYYQLY

SEQ ID NO: 26861 - protein, 8 aa, Severe acute respiratory syndrome coronavirus 2
  REGION 1..8: note = Table C
YQLYSTQL

SEQ ID NO: 26862 - protein, 8 aa, Severe acute respiratory syndrome coronavirus 2
  REGION 1..8: note = Table C
TGVEHVTF

SEQ ID NO: 26863 - protein, 8 aa, Severe acute respiratory syndrome coronavirus 2
  REGION 1..8: note = Table C
VEHVTFFI

SEQ ID NO: 26864 - protein, 8 aa, Severe acute respiratory syndrome coronavirus 2
  REGION 1..8: note = Table C
EHVTFFIY

SEQ ID NO: 26865 - protein, 8 aa, Severe acute respiratory syndrome coronavirus 2
  REGION 1..8: note = Table C
VTFFIYNK

SEQ ID NO: 26866 - protein, 8 aa, Severe acute respiratory syndrome coronavirus 2
  REGION 1..8: note = Table C
EHVQIHTI

SEQ ID NO: 26867 - protein, 8 aa, Severe acute respiratory syndrome coronavirus 2
  REGION 1..8: note = Table C
TIDGSSGV

SEQ ID NO: 26868 - protein, 9 aa, Severe acute respiratory syndrome coronavirus 2
  REGION 1..9: note = Table C
DLFMRIFTI

SEQ ID NO: 26869 - protein, 9 aa, Severe acute respiratory syndrome coronavirus 2
  REGION 1..9: note = Table C
MRIFTIGTV

SEQ ID NO: 26870 - protein, 9 aa, Severe acute respiratory syndrome coronavirus 2
  REGION 1..9: note = Table C
IFTIGTVTL

SEQ ID NO: 26871 - protein, 9 aa, Severe acute respiratory syndrome coronavirus 2
  REGION 1..9: note = Table C
FTIGTVTLK

SEQ ID NO: 26872 - protein, 9 aa, Severe acute respiratory syndrome coronavirus 2
  REGION 1..9: note = Table C
VTLKQGEIK

SEQ ID NO: 26873 - protein, 9 aa, Severe acute respiratory syndrome coronavirus 2
  REGION 1..9: note = Table C
GEIKDATPS

SEQ ID NO: 26874 - protein, 9 aa, Severe acute respiratory syndrome coronavirus 2
  REGION 1..9: note = Table C
IKDATPSDF

SEQ ID NO: 26875 - protein, 9 aa, Severe acute respiratory syndrome coronavirus 2
  REGION 1..9: note = Table C
DATPSDFVR

SEQ ID NO: 26876 - protein, 9 aa, Severe acute respiratory syndrome coronavirus 2
  REGION 1..9: note = Table C
ATPSDFVRA

SEQ ID NO: 26877 - protein, 9 aa, Severe acute respiratory syndrome coronavirus 2
  REGION 1..9: note = Table C
TPSDFVRAT

SEQ ID NO: 26878 - protein, 9 aa, Severe acute respiratory syndrome coronavirus 2
  REGION 1..9: note = Table C
SDFVRATAT

SEQ ID NO: 26879 - protein, 9 aa, Severe acute respiratory syndrome coronavirus 2
  REGION 1..9: note = Table C
DFVRATATI

SEQ ID NO: 26880 - protein, 9 aa, Severe acute respiratory syndrome coronavirus 2
  REGION 1..9: note = Table C
ATATIPIQA

SEQ ID NO: 26881 - protein, 9 aa, Severe acute respiratory syndrome coronavirus 2
  REGION 1..9: note = Table C
ATIPIQASL

SEQ ID NO: 26882 - protein, 9 aa, Severe acute respiratory syndrome coronavirus 2
  REGION 1..9: note = Table C
IPIQASLPF

SEQ ID NO: 26883 - protein, 9 aa, Severe acute respiratory syndrome coronavirus 2
  REGION 1..9: note = Table C
IQASLPFGW

SEQ ID NO: 26884 - protein, 9 aa, Severe acute respiratory syndrome coronavirus 2
  REGION 1..9: note = Table C
ASLPFGWLI

SEQ ID NO: 26885 - protein, 9 aa, Severe acute respiratory syndrome coronavirus 2
  REGION 1..9: note = Table C
LAVFQSASK

SEQ ID NO: 26886 - protein, 9 aa, Severe acute respiratory syndrome coronavirus 2
  REGION 1..9: note = Table C
AVFQSASKI

SEQ ID NO: 26887 - protein, 9 aa, Severe acute respiratory syndrome coronavirus 2
  REGION 1..9: note = Table C
VFQSASKII

SEQ ID NO: 26888 - protein, 9 aa, Severe acute respiratory syndrome coronavirus 2
  REGION 1..9: note = Table C
QSASKIITL

SEQ ID NO: 26889 - protein, 9 aa, Severe acute respiratory syndrome coronavirus 2
  REGION 1..9: note = Table C
SASKIITLK

SEQ ID NO: 26890 - protein, 9 aa, Severe acute respiratory syndrome coronavirus 2
  REGION 1..9: note = Table C
ASKIITLKK

SEQ ID NO: 26891 - protein, 9 aa, Severe acute respiratory syndrome coronavirus 2
  REGION 1..9: note = Table C
KIITLKKRW

SEQ ID NO: 26892 - protein, 9 aa, Severe acute respiratory syndrome coronavirus 2
  REGION 1..9: note = Table C
ITLKKRWQL

SEQ ID NO: 26893 - protein, 9 aa, Severe acute respiratory syndrome coronavirus 2
  REGION 1..9: note = Table C
KRWQLALSK

SEQ ID NO: 26894 - protein, 9 aa, Severe acute respiratory syndrome coronavirus 2
  REGION 1..9: note = Table C
WQLALSKGV

SEQ ID NO: 26895 - protein, 9 aa, Severe acute respiratory syndrome coronavirus 2
  REGION 1..9: note = Table C
LALSKGVHF

SEQ ID NO: 26896 - protein, 9 aa, Severe acute respiratory syndrome coronavirus 2
  REGION 1..9: note = Table C
ALSKGVHFV

SEQ ID NO: 26897 - protein, 9 aa, Severe acute respiratory syndrome coronavirus 2
  REGION 1..9: note = Table C
VHFVCNLLL

SEQ ID NO: 26898 - protein, 9 aa, Severe acute respiratory syndrome coronavirus 2
  REGION 1..9: note = Table C
YLYALVYFL

SEQ ID NO: 26899 - protein, 9 aa, Severe acute respiratory syndrome coronavirus 2
  REGION 1..9: note = Table C
ALVYFLQSI

SEQ ID NO: 26900 - protein, 9 aa, Severe acute respiratory syndrome coronavirus 2
  REGION 1..9: note = Table C
VYFLQSINF

SEQ ID NO: 26901 - protein, 9 aa, Severe acute respiratory syndrome coronavirus 2
  REGION 1..9: note = Table C
YFLQSINFV

SEQ ID NO: 26902 - protein, 9 aa, Severe acute respiratory syndrome coronavirus 2
  REGION 1..9: note = Table C
FLQSINFVR

SEQ ID NO: 26903 - protein, 9 aa, Severe acute respiratory syndrome coronavirus 2
  REGION 1..9: note = Table C
LQSINFVRI

SEQ ID NO: 26904 - protein, 9 aa, Severe acute respiratory syndrome coronavirus 2
  REGION 1..9: note = Table C
QSINFVRII

SEQ ID NO: 26905 - protein, 9 aa, Severe acute respiratory syndrome coronavirus 2
  REGION 1..9: note = Table C
SINFVRIIM

SEQ ID NO: 26906 - protein, 9 aa, Severe acute respiratory syndrome coronavirus 2
  REGION 1..9: note = Table C
HSYFTSDYY

SEQ ID NO: 26907 - protein, 9 aa, Severe acute respiratory syndrome coronavirus 2
  REGION 1..9: note = Table C
YFTSDYYQL

SEQ ID NO: 26908 - protein, 9 aa, Severe acute respiratory syndrome coronavirus 2
  REGION 1..9: note = Table C
FTSDYYQLY

SEQ ID NO: 26909 - protein, 9 aa, Severe acute respiratory syndrome coronavirus 2
  REGION 1..9: note = Table C
YYQLYSTQL

SEQ ID NO: 26910 - protein, 9 aa, Severe acute respiratory syndrome coronavirus 2
  REGION 1..9: note = Table C
QLYSTQLST

SEQ ID NO: 26911 - protein, 9 aa, Severe acute respiratory syndrome coronavirus 2
  REGION 1..9: note = Table C
TQLSTDTGV

SEQ ID NO: 26912 - protein, 9 aa, Severe acute respiratory syndrome coronavirus 2
  REGION 1..9: note = Table C
LSTDTGVEH

SEQ ID NO: 26913 - protein, 9 aa, Severe acute respiratory syndrome coronavirus 2
  REGION 1..9: note = Table C
STDTGVEHV

SEQ ID NO: 26914 - protein, 9 aa, Severe acute respiratory syndrome coronavirus 2
  REGION 1..9: note = Table C
DTGVEHVTF

SEQ ID NO: 26915 - protein, 9 aa, Severe acute respiratory syndrome coronavirus 2
  REGION 1..9: note = Table C
TGVEHVTFF

SEQ ID NO: 26916 - protein, 9 aa, Severe acute respiratory syndrome coronavirus 2
  REGION 1..9: note = Table C
VEHVTFFIY

SEQ ID NO: 26917 - protein, 9 aa, Severe acute respiratory syndrome coronavirus 2
  REGION 1..9: note = Table C
HVTFFIYNK

SEQ ID NO: 26918 - protein, 9 aa, Severe acute respiratory syndrome coronavirus 2
  REGION 1..9: note = Table C
VTFFIYNKI

SEQ ID NO: 26919 - protein, 9 aa, Severe acute respiratory syndrome coronavirus 2
  REGION 1..9: note = Table C
IVDEPEEHV

SEQ ID NO: 26920 - protein, 9 aa, Severe acute respiratory syndrome coronavirus 2
  REGION 1..9: note = Table C
DEPEEHVQI

SEQ ID NO: 26921 - protein, 9 aa, Severe acute respiratory syndrome coronavirus 2
  REGION 1..9: note = Table C
EPEEHVQIH

SEQ ID NO: 26922 - protein, 9 aa, Severe acute respiratory syndrome coronavirus 2
  REGION 1..9: note = Table C
EEHVQIHTI

SEQ ID NO: 26923 - protein, 9 aa, Severe acute respiratory syndrome coronavirus 2
  REGION 1..9: note = Table C
HTIDGSSGV

SEQ ID NO: 26924 - protein, 10 aa, Severe acute respiratory syndrome coronavirus 2
  REGION 1..10: note = Table C
FMRIFTIGTV

SEQ ID NO: 26925 - protein, 10 aa, Severe acute respiratory syndrome coronavirus 2
  REGION 1..10: note = Table C
RIFTIGTVTL

SEQ ID NO: 26926 - protein, 10 aa, Severe acute respiratory syndrome coronavirus 2
  REGION 1..10: note = Table C
FTIGTVTLKQ

SEQ ID NO: 26927 - protein, 10 aa, Severe acute respiratory syndrome coronavirus 2
  REGION 1..10: note = Table C
GTVTLKQGEI

SEQ ID NO: 26928 - protein, 10 aa, Severe acute respiratory syndrome coronavirus 2
  REGION 1..10: note = Table C
TLKQGEIKDA

SEQ ID NO: 26929 - protein, 10 aa, Severe acute respiratory syndrome coronavirus 2
  REGION 1..10: note = Table C
EIKDATPSDF

SEQ ID NO: 26930 - protein, 10 aa, Severe acute respiratory syndrome coronavirus 2
  REGION 1..10: note = Table C
DATPSDFVRA

SEQ ID NO: 26931 - protein, 10 aa, Severe acute respiratory syndrome coronavirus 2
  REGION 1..10: note = Table C
TPSDFVRATA

SEQ ID NO: 26932 - protein, 10 aa, Severe acute respiratory syndrome coronavirus 2
  REGION 1..10: note = Table C
RATATIPIQA

SEQ ID NO: 26933 - protein, 10 aa, Severe acute respiratory syndrome coronavirus 2
  REGION 1..10: note = Table C
FQSASKIITL

SEQ ID NO: 26934 - protein, 10 aa, Severe acute respiratory syndrome coronavirus 2
  REGION 1..10: note = Table C
QSASKIITLK

SEQ ID NO: 26935 - protein, 10 aa, Severe acute respiratory syndrome coronavirus 2
  REGION 1..10: note = Table C
SASKIITLKK

SEQ ID NO: 26936 - protein, 10 aa, Severe acute respiratory syndrome coronavirus 2
  REGION 1..10: note = Table C
FLQSINFVRI

SEQ ID NO: 26937 - protein, 10 aa, Severe acute respiratory syndrome coronavirus 2
  REGION 1..10: note = Table C
SINFVRIIMR

SEQ ID NO: 26938 - protein, 10 aa, Severe acute respiratory syndrome coronavirus 2
  REGION 1..10: note = Table C
LHSYFTSDYY

SEQ ID NO: 26939 - protein, 10 aa, Severe acute respiratory syndrome coronavirus 2
  REGION 1..10: note = Table C
SYFTSDYYQL

SEQ ID NO: 26940 - protein, 10 aa, Severe acute respiratory syndrome coronavirus 2
  REGION 1..10: note = Table C
YFTSDYYQLY

SEQ ID NO: 26941 - protein, 10 aa, Severe acute respiratory syndrome coronavirus 2
  REGION 1..10: note = Table C
DYYQLYSTQL

SEQ ID NO: 26942 - protein, 10 aa, Severe acute respiratory syndrome coronavirus 2
  REGION 1..10: note = Table C
LSTDTGVEHV

SEQ ID NO: 26943 - protein, 10 aa, Severe acute respiratory syndrome coronavirus 2
  REGION 1..10: note = Table C
TDTGVEHVTF

SEQ ID NO: 26944 - protein, 10 aa, Severe acute respiratory syndrome coronavirus 2
  REGION 1..10: note = Table C
KIVDEPEEHV

SEQ ID NO: 26945 - protein, 10 aa, Severe acute respiratory syndrome coronavirus 2
  REGION 1..10: note = Table C
EHVQIHTIDG

SEQ ID NO: 26946 - protein, 11 aa, Severe acute respiratory syndrome coronavirus 2
  REGION 1..11: note = Table C
MRIFTIGTVTL

SEQ ID NO: 26947 - protein, 11 aa, Severe acute respiratory syndrome coronavirus 2
  REGION 1..11: note = Table C
RIFTIGTVTLK

SEQ ID NO: 26948 - protein, 11 aa, Severe acute respiratory syndrome coronavirus 2
  REGION 1..11: note = Table C
FTIGTVTLKQG

SEQ ID NO: 26949 - protein, 11 aa, Severe acute respiratory syndrome coronavirus 2
  REGION 1..11: note = Table C
GEIKDATPSDF

SEQ ID NO: 26950 - protein, 11 aa, Severe acute respiratory syndrome coronavirus 2
  REGION 1..11: note = Table C
EIKDATPSDFV

SEQ ID NO: 26951 - protein, 11 aa, Severe acute respiratory syndrome coronavirus 2
  REGION 1..11: note = Table C
TPSDFVRATAT

SEQ ID NO: 26952 - protein, 11 aa, Severe acute respiratory syndrome coronavirus 2
  REGION 1..11: note = Table C
IPIQASLPFGW

SEQ ID NO: 26953 - protein, 11 aa, Severe acute respiratory syndrome coronavirus 2
  REGION 1..11: note = Table C
VFQSASKIITL

SEQ ID NO: 26954 - protein, 11 aa, Severe acute respiratory syndrome coronavirus 2
  REGION 1..11: note = Table C
KIITLKKRWQL

SEQ ID NO: 26955 - protein, 11 aa, Severe acute respiratory syndrome coronavirus 2
  REGION 1..11: note = Table C
YFLQSINFVRI

SEQ ID NO: 26956 - protein, 11 aa, Severe acute respiratory syndrome coronavirus 2
  REGION 1..11: note = Table C
QSINFVRIIMR

SEQ ID NO: 26957 - protein, 11 aa, Severe acute respiratory syndrome coronavirus 2
  REGION 1..11: note = Table C
VLHSYFTSDYY

SEQ ID NO: 26958 - protein, 11 aa, Severe acute respiratory syndrome coronavirus 2
  REGION 1..11: note = Table C
SYFTSDYYQLY

SEQ ID NO: 26959 - protein, 11 aa, Severe acute respiratory syndrome coronavirus 2
  REGION 1..11: note = Table C
QLSTDTGVEHV

SEQ ID NO: 26960 - protein, 11 aa, Severe acute respiratory syndrome coronavirus 2
  REGION 1..11: note = Table C
STDTGVEHVTF

SEQ ID NO: 26961 - protein, 11 aa, Severe acute respiratory syndrome coronavirus 2
  REGION 1..11: note = Table C
EHVTFFIYNKI

SEQ ID NO: 26962 - protein, 11 aa, Severe acute respiratory syndrome coronavirus 2
  REGION 1..11: note = Table C
IVDEPEEHVQI

SEQ ID NO: 26963 - protein, 8 aa, Severe acute respiratory syndrome coronavirus 2
  REGION 1..8: note = Table C
IVNVSLVK

SEQ ID NO: 26964 - protein, 8 aa, Severe acute respiratory syndrome coronavirus 2
  REGION 1..8: note = Table C
VSLVKPSF

SEQ ID NO: 26965 - protein, 8 aa, Severe acute respiratory syndrome coronavirus 2
  REGION 1..8: note = Table C
LVKPSFYV

SEQ ID NO: 26966 - protein, 8 aa, Severe acute respiratory syndrome coronavirus 2
  REGION 1..8: note = Table C
VKPSFYVY

SEQ ID NO: 26967 - protein, 9 aa, Severe acute respiratory syndrome coronavirus 2
  REGION 1..9: note = Table C
NIVNVSLVK

SEQ ID NO: 26968 - protein, 9 aa, Severe acute respiratory syndrome coronavirus 2
  REGION 1..9: note = Table C
NVSLVKPSF

SEQ ID NO: 26969 - protein, 9 aa, Severe acute respiratory syndrome coronavirus 2
  REGION 1..9: note = Table C
VSLVKPSFY

SEQ ID NO: 26970 - protein, 9 aa, Severe acute respiratory syndrome coronavirus 2
  REGION 1..9: note = Table C
SLVKPSFYV

SEQ ID NO: 26971 - protein, 9 aa, Severe acute respiratory syndrome coronavirus 2
  REGION 1..9: note = Table C
LVKPSFYVY

SEQ ID NO: 26972 - protein, 9 aa, Severe acute respiratory syndrome coronavirus 2
  REGION 1..9: note = Table C
PSFYVYSRV

SEQ ID NO: 26973 - protein, 9 aa, Severe acute respiratory syndrome coronavirus 2
  REGION 1..9: note = Table C
SFYVYSRVK

SEQ ID NO: 26974 - protein, 9 aa, Severe acute respiratory syndrome coronavirus 2
  REGION 1..9: note = Table C
YVYSRVKNL

SEQ ID NO: 26975 - protein, 9 aa, Severe acute respiratory syndrome coronavirus 2
  REGION 1..9: note = Table C
RVKNLNSSR

SEQ ID NO: 26976 - protein, 10 aa, Severe acute respiratory syndrome coronavirus 2
  REGION 1..10: note = Table C
SLVKPSFYVY

SEQ ID NO: 26977 - protein, 10 aa, Severe acute respiratory syndrome coronavirus 2
  REGION 1..10: note = Table C
SRVKNLNSSR

SEQ ID NO: 26978 - protein, 10 aa, Severe acute respiratory syndrome coronavirus 2
  REGION 1..10: note = Table C
RVKNLNSSRV

SEQ ID NO: 26979 - protein, 11 aa, Severe acute respiratory syndrome coronavirus 2
  REGION 1..11: note = Table C
IVNVSLVKPSF

SEQ ID NO: 26980 - protein, 11 aa, Severe acute respiratory syndrome coronavirus 2
  REGION 1..11: note = Table C
LVKPSFYVYSR

SEQ ID NO: 26981 - protein, 8 aa, Severe acute respiratory syndrome coronavirus 2
  REGION 1..8: note = Table C
FAYANRNR

SEQ ID NO: 26982 - protein, 8 aa, Severe acute respiratory syndrome coronavirus 2
  REGION 1..8: note = Table C
YANRNRFL

SEQ ID NO: 26983 - protein, 8 aa, Severe acute respiratory syndrome coronavirus 2
  REGION 1..8: note = Table C
FLYIIKLI

SEQ ID NO: 26984 - protein, 8 aa, Severe acute respiratory syndrome coronavirus 2
  REGION 1..8: note = Table C
YIIKLIFL

SEQ ID NO: 26985 - protein, 8 aa, Severe acute respiratory syndrome coronavirus 2
  REGION 1..8: note = Table C
LMWLSYFI

SEQ ID NO: 26986 - protein, 8 aa, Severe acute respiratory syndrome coronavirus 2
  REGION 1..8: note = Table C
SYFIASFR

SEQ ID NO: 26987 - protein, 8 aa, Severe acute respiratory syndrome coronavirus 2
  REGION 1..8: note = Table C
YFIASFRL

SEQ ID NO: 26988 - protein, 8 aa, Severe acute respiratory syndrome coronavirus 2
  REGION 1..8: note = Table C
FIASFRLF

SEQ ID NO: 26989 - protein, 8 aa, Severe acute respiratory syndrome coronavirus 2
  REGION 1..8: note = Table C
ASFRLFAR

SEQ ID NO: 26990 - protein, 8 aa, Severe acute respiratory syndrome coronavirus 2
  REGION 1..8: note = Table C
RTRSMWSF

SEQ ID NO: 26991 - protein, 8 aa, Severe acute respiratory syndrome coronavirus 2
  REGION 1..8: note = Table C
VPLHGTIL

SEQ ID NO: 26992 - protein, 8 aa, Severe acute respiratory syndrome coronavirus 2
  REGION 1..8: note = Table C
TILTRPLL

SEQ ID NO: 26993 - protein, 8 aa, Severe acute respiratory syndrome coronavirus 2
  REGION 1..8: note = Table C
RPLLESEL

SEQ ID NO: 26994 - protein, 8 aa, Severe acute respiratory syndrome coronavirus 2
  REGION 1..8: note = Table C
TSRTLSYY

SEQ ID NO: 26995 - protein, 8 aa, Severe acute respiratory syndrome coronavirus 2
  REGION 1..8: note = Table C
RTLSYYKL

SEQ ID NO: 26996 - protein, 8 aa, Severe acute respiratory syndrome coronavirus 2
  REGION 1..8: note = Table C
KLGASQRV

SEQ ID NO: 26997 - protein, 8 aa, Severe acute respiratory syndrome coronavirus 2
  REGION 1..8: note = Table C
GDSGFAAY

SEQ ID NO: 26998 - protein, 8 aa, Severe acute respiratory syndrome coronavirus 2
  REGION 1..8: note = Table C
FAAYSRYR

SEQ ID NO: 26999 - protein, 9 aa, Severe acute respiratory syndrome coronavirus 2
  REGION 1..9: note = Table C
LLQFAYANR

SEQ ID NO: 27000 - protein, 9 aa, Severe acute respiratory syndrome coronavirus 2
  REGION 1..9: note = Table C
QFAYANRNR

SEQ ID NO: 27001 - protein, 9 aa, Severe acute respiratory syndrome coronavirus 2
  REGION 1..9: note = Table C
FAYANRNRF

SEQ ID NO: 27002 - protein, 9 aa, Severe acute respiratory syndrome coronavirus 2
  REGION 1..9: note = Table C
AYANRNRFL

SEQ ID NO: 27003 - protein, 9 aa, Severe acute respiratory syndrome coronavirus 2
  REGION 1..9: note = Table C
YANRNRFLY

SEQ ID NO: 27004 - protein, 9 aa, Severe acute respiratory syndrome coronavirus 2
  REGION 1..9: note = Table C
ANRNRFLYI

SEQ ID NO: 27005 - protein, 9 aa, Severe acute respiratory syndrome coronavirus 2
  REGION 1..9: note = Table C
NRFLYIIKL

SEQ ID NO: 27006 - protein, 9 aa, Severe acute respiratory syndrome coronavirus 2
  REGION 1..9: note = Table C
RFLYIIKLI

SEQ ID NO: 27007 - protein, 9 aa, Severe acute respiratory syndrome coronavirus 2
  REGION 1..9: note = Table C
LYIIKLIFL

SEQ ID NO: 27008 - protein, 9 aa, Severe acute respiratory syndrome coronavirus 2
  REGION 1..9: note = Table C
YIIKLIFLW

SEQ ID NO: 27009 - protein, 9 aa, Severe acute respiratory syndrome coronavirus 2
  REGION 1..9: note = Table C
LVGLMWLSY

SEQ ID NO: 27010 - protein, 9 aa, Severe acute respiratory syndrome coronavirus 2
  REGION 1..9: note = Table C
WLSYFIASF

SEQ ID NO: 27011 - protein, 9 aa, Severe acute respiratory syndrome coronavirus 2
  REGION 1..9: note = Table C
LSYFIASFR

SEQ ID NO: 27012 - protein, 9 aa, Severe acute respiratory syndrome coronavirus 2
  REGION 1..9: note = Table C
SYFIASFRL

SEQ ID NO: 27013 - protein, 9 aa, Severe acute respiratory syndrome coronavirus 2
  REGION 1..9: note = Table C
YFIASFRLF

SEQ ID NO: 27014 - protein, 9 aa, Severe acute respiratory syndrome coronavirus 2
  REGION 1..9: note = Table C
IASFRLFAR

SEQ ID NO: 27015 - protein, 9 aa, Severe acute respiratory syndrome coronavirus 2
  REGION 1..9: note = Table C
ASFRLFART

SEQ ID NO: 27016 - protein, 9 aa, Severe acute respiratory syndrome coronavirus 2
  REGION 1..9: note = Table C
SFRLFARTR

SEQ ID NO: 27017 - protein, 9 aa, Severe acute respiratory syndrome coronavirus 2
  REGION 1..9: note = Table C
RLFARTRSM

SEQ ID NO: 27018 - protein, 9 aa, Severe acute respiratory syndrome coronavirus 2
  REGION 1..9: note = Table C
LFARTRSMW

SEQ ID NO: 27019 - protein, 9 aa, Severe acute respiratory syndrome coronavirus 2
  REGION 1..9: note = Table C
ARTRSMWSF

SEQ ID NO: 27020 - protein, 9 aa, Severe acute respiratory syndrome coronavirus 2
  REGION 1..9: note = Table C
SMWSFNPET

SEQ ID NO: 27021 - protein, 9 aa, Severe acute respiratory syndrome coronavirus 2
  REGION 1..9: note = Table C
SFNPETNIL

SEQ ID NO: 27022 - protein, 9 aa, Severe acute respiratory syndrome coronavirus 2
  REGION 1..9: note = Table C
PETNILLNV

SEQ ID NO: 27023 - protein, 9 aa, Severe acute respiratory syndrome coronavirus 2
  REGION 1..9: note = Table C
ILLNVPLHG

SEQ ID NO: 27024 - protein, 9 aa, Severe acute respiratory syndrome coronavirus 2
  REGION 1..9: note = Table C
LLNVPLHGT

SEQ ID NO: 27025 - protein, 9 aa, Severe acute respiratory syndrome coronavirus 2
  REGION 1..9: note = Table C
NVPLHGTIL

SEQ ID NO: 27026 - protein, 9 aa, Severe acute respiratory syndrome coronavirus 2
  REGION 1..9: note = Table C
VPLHGTILT

SEQ ID NO: 27027 - protein, 9 aa, Severe acute respiratory syndrome coronavirus 2
  REGION 1..9: note = Table C
PLHGTILTR

SEQ ID NO: 27028 - protein, 9 aa, Severe acute respiratory syndrome coronavirus 2
  REGION 1..9: note = Table C
GTILTRPLL

SEQ ID NO: 27029 - protein, 9 aa, Severe acute respiratory syndrome coronavirus 2
  REGION 1..9: note = Table C
TRPLLESEL

SEQ ID NO: 27030 - protein, 9 aa, Severe acute respiratory syndrome coronavirus 2
  REGION 1..9: note = Table C
RPLLESELV

SEQ ID NO: 27031 - protein, 9 aa, Severe acute respiratory syndrome coronavirus 2
  REGION 1..9: note = Table C
TSRTLSYYK

SEQ ID NO: 27032 - protein, 9 aa, Severe acute respiratory syndrome coronavirus 2
  REGION 1..9: note = Table C
SRTLSYYKL

SEQ ID NO: 27033 - protein, 9 aa, Severe acute respiratory syndrome coronavirus 2
  REGION 1..9: note = Table C
RTLSYYKLG

SEQ ID NO: 27034 - protein, 9 aa, Severe acute respiratory syndrome coronavirus 2
  REGION 1..9: note = Table C
YYKLGASQR

SEQ ID NO: 27035 - protein, 9 aa, Severe acute respiratory syndrome coronavirus 2
  REGION 1..9: note = Table C
QRVAGDSGF

SEQ ID NO: 27036 - protein, 9 aa, Severe acute respiratory syndrome coronavirus 2
  REGION 1..9: note = Table C
RVAGDSGFA

SEQ ID NO: 27037 - protein, 9 aa, Severe acute respiratory syndrome coronavirus 2
  REGION 1..9: note = Table C
VAGDSGFAA

SEQ ID NO: 27038 - protein, 9 aa, Severe acute respiratory syndrome coronavirus 2
  REGION 1..9: note = Table C
AGDSGFAAY

SEQ ID NO: 27039 - protein, 9 aa, Severe acute respiratory syndrome coronavirus 2
  REGION 1..9: note = Table C
DSGFAAYSR

SEQ ID NO: 27040 - protein, 9 aa, Severe acute respiratory syndrome coronavirus 2
  REGION 1..9: note = Table C
SGFAAYSRY

SEQ ID NO: 27041 - protein, 9 aa, Severe acute respiratory syndrome coronavirus 2
  REGION 1..9: note = Table C
YSRYRIGNY

SEQ ID NO: 27042 - protein, 10 aa, Severe acute respiratory syndrome coronavirus 2
  REGION 1..10: note = Table C
QFAYANRNRF

SEQ ID NO: 27043 - protein, 10 aa, Severe acute respiratory syndrome coronavirus 2
  REGION 1..10: note = Table C
FAYANRNRFL

SEQ ID NO: 27044 - protein, 10 aa, Severe acute respiratory syndrome coronavirus 2
  REGION 1..10: note = Table C
AYANRNRFLY

SEQ ID NO: 27045 - protein, 10 aa, Severe acute respiratory syndrome coronavirus 2
  REGION 1..10: note = Table C
RFLYIIKLIF

SEQ ID NO: 27046 - protein, 10 aa, Severe acute respiratory syndrome coronavirus 2
  REGION 1..10: note = Table C
FLYIIKLIFL

SEQ ID NO: 27047 - protein, 10 aa, Severe acute respiratory syndrome coronavirus 2
  REGION 1..10: note = Table C
LYIIKLIFLW

SEQ ID NO: 27048 - protein, 10 aa, Severe acute respiratory syndrome coronavirus 2
  REGION 1..10: note = Table C
MWLSYFIASF

SEQ ID NO: 27049 - protein, 10 aa, Severe acute respiratory syndrome coronavirus 2
  REGION 1..10: note = Table C
SYFIASFRLF

SEQ ID NO: 27050 - protein, 10 aa, Severe acute respiratory syndrome coronavirus 2
  REGION 1..10: note = Table C
YFIASFRLFA

SEQ ID NO: 27051 - protein, 10 aa, Severe acute respiratory syndrome coronavirus 2
  REGION 1..10: note = Table C
FIASFRLFAR

SEQ ID NO: 27052 - protein, 10 aa, Severe acute respiratory syndrome coronavirus 2
  REGION 1..10: note = Table C
ASFRLFARTR

SEQ ID NO: 27053 - protein, 10 aa, Severe acute respiratory syndrome coronavirus 2
  REGION 1..10: note = Table C
RLFARTRSMW

SEQ ID NO: 27054 - protein, 10 aa, Severe acute respiratory syndrome coronavirus 2
  REGION 1..10: note = Table C
ILLNVPLHGT

SEQ ID NO: 27055 - protein, 10 aa, Severe acute respiratory syndrome coronavirus 2
  REGION 1..10: note = Table C
VPLHGTILTR

SEQ ID NO: 27056 - protein, 10 aa, Severe acute respiratory syndrome coronavirus 2
  REGION 1..10: note = Table C
LTRPLLESEL

SEQ ID NO: 27057 - protein, 10 aa, Severe acute respiratory syndrome coronavirus 2
  REGION 1..10: note = Table C
RPLLESELVI

SEQ ID NO: 27058 - protein, 10 aa, Severe acute respiratory syndrome coronavirus 2
  REGION 1..10: note = Table C
SYYKLGASQR

SEQ ID NO: 27059 - protein, 10 aa, Severe acute respiratory syndrome coronavirus 2
  REGION 1..10: note = Table C
SQRVAGDSGF

SEQ ID NO: 27060 - protein, 10 aa, Severe acute respiratory syndrome coronavirus 2
  REGION 1..10: note = Table C
RVAGDSGFAA

SEQ ID NO: 27061 - protein, 10 aa, Severe acute respiratory syndrome coronavirus 2
  REGION 1..10: note = Table C
VAGDSGFAAY

SEQ ID NO: 27062 - protein, 10 aa, Severe acute respiratory syndrome coronavirus 2
  REGION 1..10: note = Table C
GDSGFAAYSR

SEQ ID NO: 27063 - protein, 10 aa, Severe acute respiratory syndrome coronavirus 2
  REGION 1..10: note = Table C
DSGFAAYSRY

SEQ ID NO: 27064 - protein, 10 aa, Severe acute respiratory syndrome coronavirus 2
  REGION 1..10: note = Table C
AYSRYRIGNY

SEQ ID NO: 27065 - protein, 11 aa, Severe acute respiratory syndrome coronavirus 2
  REGION 1..11: note = Table C
LLQFAYANRNR

SEQ ID NO: 27066 - protein, 11 aa, Severe acute respiratory syndrome coronavirus 2
  REGION 1..11: note = Table C
FAYANRNRFLY

SEQ ID NO: 27067 - protein, 11 aa, Severe acute respiratory syndrome coronavirus 2
  REGION 1..11: note = Table C
AYANRNRFLYI

SEQ ID NO: 27068 - protein, 11 aa, Severe acute respiratory syndrome coronavirus 2
  REGION 1..11: note = Table C
LSYFIASFRLF

SEQ ID NO: 27069 - protein, 11 aa, Severe acute respiratory syndrome coronavirus 2
  REGION 1..11: note = Table C
SMWSFNPETNI

SEQ ID NO: 27070 - protein, 11 aa, Severe acute respiratory syndrome coronavirus 2
  REGION 1..11: note = Table C
WSFNPETNILL

SEQ ID NO: 27071 - protein, 11 aa, Severe acute respiratory syndrome coronavirus 2
  REGION 1..11: note = Table C
NVPLHGTILTR

SEQ ID NO: 27072 - protein, 11 aa, Severe acute respiratory syndrome coronavirus 2
  REGION 1..11: note = Table C
LSYYKLGASQR

SEQ ID NO: 27073 - protein, 11 aa, Severe acute respiratory syndrome coronavirus 2
  REGION 1..11: note = Table C
ASQRVAGDSGF

SEQ ID NO: 27074 - protein, 11 aa, Severe acute respiratory syndrome coronavirus 2
  REGION 1..11: note = Table C
QRVAGDSGFAA

SEQ ID NO: 27075 - protein, 11 aa, Severe acute respiratory syndrome coronavirus 2
  REGION 1..11: note = Table C
RVAGDSGFAAY

SEQ ID NO: 27076 - protein, 11 aa, Severe acute respiratory syndrome coronavirus 2
  REGION 1..11: note = Table C
GDSGFAAYSRY

SEQ ID NO: 27077 - protein, 11 aa, Severe acute respiratory syndrome coronavirus 2
  REGION 1..11: note = Table C
DSGFAAYSRYR

SEQ ID NO: 27078 - protein, 11 aa, Severe acute respiratory syndrome coronavirus 2
  REGION 1..11: note = Table C
AAYSRYRIGNY

SEQ ID NO: 27079 - protein, 8 aa, Severe acute respiratory syndrome coronavirus 2
  REGION 1..8: note = Table C
SPDDQIGY

SEQ ID NO: 27080 - protein, 8 aa, Severe acute respiratory syndrome coronavirus 2
  REGION 1..8: note = Table C
PDDQIGYY

SEQ ID NO: 27081 - protein, 8 aa, Severe acute respiratory syndrome coronavirus 2
  REGION 1..8: note = Table C
DDQIGYYR

SEQ ID NO: 27082 - protein, 8 aa, Severe acute respiratory syndrome coronavirus 2
  REGION 1..8: note = Table C
NAAIVLQL

SEQ ID NO: 27083 - protein, 8 aa, Severe acute respiratory syndrome coronavirus 2
  REGION 1..8: note = Table C
QLPQGTTL

SEQ ID NO: 27084 - protein, 8 aa, Severe acute respiratory syndrome coronavirus 2
  REGION 1..8: note = Table C
PQGTTLPK

SEQ ID NO: 27085 - protein, 8 aa, Severe acute respiratory syndrome coronavirus 2
  REGION 1..8: note = Table C
TATKAYNV

SEQ ID NO: 27086 - protein, 8 aa, Severe acute respiratory syndrome coronavirus 2
  REGION 1..8: note = Table C
AYNVTQAF

SEQ ID NO: 27087 - protein, 8 aa, Severe acute respiratory syndrome coronavirus 2
  REGION 1..8: note = Table C
NVTQAFGR

SEQ ID NO: 27088 - protein, 8 aa, Severe acute respiratory syndrome coronavirus 2
  REGION 1..8: note = Table C
FAPSASAF

SEQ ID NO: 27089 - protein, 8 aa, Severe acute respiratory syndrome coronavirus 2
  REGION 1..8: note = Table C
APSASAFF

SEQ ID NO: 27090 - protein, 8 aa, Severe acute respiratory syndrome coronavirus 2
  REGION 1..8: note = Table C
SAFFGMSR

SEQ ID NO: 27091 - protein, 8 aa, Severe acute respiratory syndrome coronavirus 2
  REGION 1..8: note = Table C
AFFGMSRI

SEQ ID NO: 27092 - protein, 8 aa, Severe acute respiratory syndrome coronavirus 2
  REGION 1..8: note = Table C
FGMSRIGM

SEQ ID NO: 27093 - protein, 8 aa, Severe acute respiratory syndrome coronavirus 2
  REGION 1..8: note = Table C
MSRIGMEV

SEQ ID NO: 27094 - protein, 8 aa, Severe acute respiratory syndrome coronavirus 2
  REGION 1..8: note = Table C
EVTPSGTW

SEQ ID NO: 27095 - protein, 8 aa, Severe acute respiratory syndrome coronavirus 2
  REGION 1..8: note = Table C
VTPSGTWL

SEQ ID NO: 27096 - protein, 8 aa, Severe acute respiratory syndrome coronavirus 2
  REGION 1..8: note = Table C
TYTGAIKL

SEQ ID NO: 27097 - protein, 8 aa, Severe acute respiratory syndrome coronavirus 2
  REGION 1..8: note = Table C
LNKHIDAY

SEQ ID NO: 27098 - protein, 8 aa, Severe acute respiratory syndrome coronavirus 2
  REGION 1..8: note = Table C
KTFPPTEP

SEQ ID NO: 27099 - protein, 8 aa, Severe acute respiratory syndrome coronavirus 2
  REGION 1..8: note = Table C
KADETQAL

SEQ ID NO: 27100 - protein, 8 aa, Severe acute respiratory syndrome coronavirus 2
  REGION 1..8: note = Table C
ETQALPQR

SEQ ID NO: 27101 - protein, 8 aa, Severe acute respiratory syndrome coronavirus 2
  REGION 1..8: note = Table C
QALPQRQK

SEQ ID NO: 27102 - protein, 8 aa, Severe acute respiratory syndrome coronavirus 2
  REGION 1..8: note = Table C
RQKKQQTV

SEQ ID NO: 27103 - protein, 9 aa, Severe acute respiratory syndrome coronavirus 2
  REGION 1..9: note = Table C
SPDDQIGYY

SEQ ID NO: 27104 - protein, 9 aa, Severe acute respiratory syndrome coronavirus 2
  REGION 1..9: note = Table C
DDQIGYYRR

SEQ ID NO: 27105 - protein, 9 aa, Severe acute respiratory syndrome coronavirus 2
  REGION 1..9: note = Table C
PANNAAIVL

SEQ ID NO: 27106 - protein, 9 aa, Severe acute respiratory syndrome coronavirus 2
  REGION 1..9: note = Table C
NNAAIVLQL

SEQ ID NO: 27107 - protein, 9 aa, Severe acute respiratory syndrome coronavirus 2
  REGION 1..9: note = Table C
LQLPQGTTL

SEQ ID NO: 27108 - protein, 9 aa, Severe acute respiratory syndrome coronavirus 2
  REGION 1..9: note = Table C
LPQGTTLPK

SEQ ID NO: 27109 - protein, 9 aa, Severe acute respiratory syndrome coronavirus 2
  REGION 1..9: note = Table C
GTTLPKGFY

SEQ ID NO: 27110 - protein, 9 aa, Severe acute respiratory syndrome coronavirus 2
  REGION 1..9: note = Table C
TTLPKGFYA

SEQ ID NO: 27111 - protein, 9 aa, Severe acute respiratory syndrome coronavirus 2
  REGION 1..9: note = Table C
LPKGFYAEG

SEQ ID NO: 27112 - protein, 9 aa, Severe acute respiratory syndrome coronavirus 2
  REGION 1..9: note = Table C
QKRTATKAY

SEQ ID NO: 27113 - protein, 9 aa, Severe acute respiratory syndrome coronavirus 2
  REGION 1..9: note = Table C
RTATKAYNV

SEQ ID NO: 27114 - protein, 9 aa, Severe acute respiratory syndrome coronavirus 2
  REGION 1..9: note = Table C
ATKAYNVTQ

SEQ ID NO: 27115 - protein, 9 aa, Severe acute respiratory syndrome coronavirus 2
  REGION 1..9: note = Table C
TKAYNVTQA

SEQ ID NO: 27116 - protein, 9 aa, Severe acute respiratory syndrome coronavirus 2
  REGION 1..9: note = Table C
KAYNVTQAF

SEQ ID NO: 27117 - protein, 9 aa, Severe acute respiratory syndrome coronavirus 2
  REGION 1..9: note = Table C
YNVTQAFGR

SEQ ID NO: 27118 - protein, 9 aa, Severe acute respiratory syndrome coronavirus 2
  REGION 1..9: note = Table C
NVTQAFGRR

SEQ ID NO: 27119 - protein, 9 aa, Severe acute respiratory syndrome coronavirus 2
  REGION 1..9: note = Table C
QIAQFAPSA

SEQ ID NO: 27120 - protein, 9 aa, Severe acute respiratory syndrome coronavirus 2
  REGION 1..9: note = Table C
AQFAPSASA

SEQ ID NO: 27121 - protein, 9 aa, Severe acute respiratory syndrome coronavirus 2
  REGION 1..9: note = Table C
QFAPSASAF

SEQ ID NO: 27122 - protein, 9 aa, Severe acute respiratory syndrome coronavirus 2
  REGION 1..9: note = Table C
FAPSASAFF

SEQ ID NO: 27123 - protein, 9 aa, Severe acute respiratory syndrome coronavirus 2
  REGION 1..9: note = Table C
ASAFFGMSR

SEQ ID NO: 27124 - protein, 9 aa, Severe acute respiratory syndrome coronavirus 2
  REGION 1..9: note = Table C
SAFFGMSRI

SEQ ID NO: 27125 - protein, 9 aa, Severe acute respiratory syndrome coronavirus 2
  REGION 1..9: note = Table C
FFGMSRIGM

SEQ ID NO: 27126 - protein, 9 aa, Severe acute respiratory syndrome coronavirus 2
  REGION 1..9: note = Table C
GMSRIGMEV

SEQ ID NO: 27127 - protein, 9 aa, Severe acute respiratory syndrome coronavirus 2
  REGION 1..9: note = Table C
SRIGMEVTP

SEQ ID NO: 27128 - protein, 9 aa, Severe acute respiratory syndrome coronavirus 2
  REGION 1..9: note = Table C
MEVTPSGTW

SEQ ID NO: 27129 - protein, 9 aa, Severe acute respiratory syndrome coronavirus 2
  REGION 1..9: note = Table C
EVTPSGTWL

SEQ ID NO: 27130 - protein, 9 aa, Severe acute respiratory syndrome coronavirus 2
  REGION 1..9: note = Table C
TPSGTWLTY

SEQ ID NO: 27131 - protein, 9 aa, Severe acute respiratory syndrome coronavirus 2
  REGION 1..9: note = Table C
LTYTGAIKL

SEQ ID NO: 27132 - protein, 9 aa, Severe acute respiratory syndrome coronavirus 2
  REGION 1..9: note = Table C
LLNKHIDAY

SEQ ID NO: 27133 - protein, 9 aa, Severe acute respiratory syndrome coronavirus 2
  REGION 1..9: note = Table C
KHIDAYKTF

SEQ ID NO: 27134 - protein, 9 aa, Severe acute respiratory syndrome coronavirus 2
  REGION 1..9: note = Table C
KTFPPTEPK

SEQ ID NO: 27135 - protein, 9 aa, Severe acute respiratory syndrome coronavirus 2
  REGION 1..9: note = Table C
KKADETQAL

SEQ ID NO: 27136 - protein, 9 aa, Severe acute respiratory syndrome coronavirus 2
  REGION 1..9: note = Table C
DETQALPQR

SEQ ID NO: 27137 - protein, 9 aa, Severe acute respiratory syndrome coronavirus 2
  REGION 1..9: note = Table C
ETQALPQRQ

SEQ ID NO: 27138 - protein, 9 aa, Severe acute respiratory syndrome coronavirus 2
  REGION 1..9: note = Table C
TQALPQRQK

SEQ ID NO: 27139 - protein, 9 aa, Severe acute respiratory syndrome coronavirus 2
  REGION 1..9: note = Table C
QALPQRQKK

SEQ ID NO: 27140 - protein, 10 aa, Severe acute respiratory syndrome coronavirus 2
  REGION 1..10: note = Table C
NSSPDDQIGY

SEQ ID NO: 27141 - protein, 10 aa, Severe acute respiratory syndrome coronavirus 2
  REGION 1..10: note = Table C
SSPDDQIGYY

SEQ ID NO: 27142 - protein, 10 aa, Severe acute respiratory syndrome coronavirus 2
  REGION 1..10: note = Table C
SPDDQIGYYR

SEQ ID NO: 27143 - protein, 10 aa, Severe acute respiratory syndrome coronavirus 2
  REGION 1..10: note = Table C
VLQLPQGTTL

SEQ ID NO: 27144 - protein, 10 aa, Severe acute respiratory syndrome coronavirus 2
  REGION 1..10: note = Table C
QLPQGTTLPK

SEQ ID NO: 27145 - protein, 10 aa, Severe acute respiratory syndrome coronavirus 2
  REGION 1..10: note = Table C
QGTTLPKGFY

SEQ ID NO: 27146 - protein, 10 aa, Severe acute respiratory syndrome coronavirus 2
  REGION 1..10: note = Table C
TLPKGFYAEG

SEQ ID NO: 27147 - protein, 10 aa, Severe acute respiratory syndrome coronavirus 2
  REGION 1..10: note = Table C
RQKRTATKAY

SEQ ID NO: 27148 - protein, 10 aa, Severe acute respiratory syndrome coronavirus 2
  REGION 1..10: note = Table C
ATKAYNVTQA

SEQ ID NO: 27149 - protein, 10 aa, Severe acute respiratory syndrome coronavirus 2
  REGION 1..10: note = Table C
TKAYNVTQAF

SEQ ID NO: 27150 - protein, 10 aa, Severe acute respiratory syndrome coronavirus 2
  REGION 1..10: note = Table C
KAYNVTQAFG

SEQ ID NO: 27151 - protein, 10 aa, Severe acute respiratory syndrome coronavirus 2
  REGION 1..10: note = Table C
AYNVTQAFGR

SEQ ID NO: 27152 - protein, 10 aa, Severe acute respiratory syndrome coronavirus 2
  REGION 1..10: note = Table C
YNVTQAFGRR

SEQ ID NO: 27153 - protein, 10 aa, Severe acute respiratory syndrome coronavirus 2
  REGION 1..10: note = Table C
AQFAPSASAF

SEQ ID NO: 27154 - protein, 10 aa, Severe acute respiratory syndrome coronavirus 2
  REGION 1..10: note = Table C
QFAPSASAFF

SEQ ID NO: 27155 - protein, 10 aa, Severe acute respiratory syndrome coronavirus 2
  REGION 1..10: note = Table C
APSASAFFGM

SEQ ID NO: 27156 - protein, 10 aa, Severe acute respiratory syndrome coronavirus 2
  REGION 1..10: note = Table C
SASAFFGMSR

SEQ ID NO: 27157 - protein, 10 aa, Severe acute respiratory syndrome coronavirus 2
  REGION 1..10: note = Table C
AFFGMSRIGM

SEQ ID NO: 27158 - protein, 10 aa, Severe acute respiratory syndrome coronavirus 2
  REGION 1..10: note = Table C
FGMSRIGMEV

SEQ ID NO: 27159 - protein, 10 aa, Severe acute respiratory syndrome coronavirus 2
  REGION 1..10: note = Table C
MEVTPSGTWL

SEQ ID NO: 27160 - protein, 10 aa, Severe acute respiratory syndrome coronavirus 2
  REGION 1..10: note = Table C
VTPSGTWLTY

SEQ ID NO: 27161 - protein, 10 aa, Severe acute respiratory syndrome coronavirus 2
  REGION 1..10: note = Table C
KTFPPTEPKK

SEQ ID NO: 27162 - protein, 10 aa, Severe acute respiratory syndrome coronavirus 2
  REGION 1..10: note = Table C
KADETQALPQ

SEQ ID NO: 27163 - protein, 10 aa, Severe acute respiratory syndrome coronavirus 2
  REGION 1..10: note = Table C
ETQALPQRQK

SEQ ID NO: 27164 - protein, 11 aa, Severe acute respiratory syndrome coronavirus 2
  REGION 1..11: note = Table C
NSSPDDQIGYY

SEQ ID NO: 27165 - protein, 11 aa, Severe acute respiratory syndrome coronavirus 2
  REGION 1..11: note = Table C
SSPDDQIGYYR

SEQ ID NO: 27166 - protein, 11 aa, Severe acute respiratory syndrome coronavirus 2
  REGION 1..11: note = Table C
IVLQLPQGTTL

SEQ ID NO: 27167 - protein, 11 aa, Severe acute respiratory syndrome coronavirus 2
  REGION 1..11: note = Table C
LQLPQGTTLPK

SEQ ID NO: 27168 - protein, 11 aa, Severe acute respiratory syndrome coronavirus 2
  REGION 1..11: note = Table C
TTLPKGFYAEG

SEQ ID NO: 27169 - protein, 11 aa, Severe acute respiratory syndrome coronavirus 2
  REGION 1..11: note = Table C
ATKAYNVTQAF

SEQ ID NO: 27170 - protein, 11 aa, Severe acute respiratory syndrome coronavirus 2
  REGION 1..11: note = Table C
KAYNVTQAFGR

SEQ ID NO: 27171 - protein, 11 aa, Severe acute respiratory syndrome coronavirus 2
  REGION 1..11: note = Table C
WPQIAQFAPSA

SEQ ID NO: 27172 - protein, 11 aa, Severe acute respiratory syndrome coronavirus 2
  REGION 1..11: note = Table C
AQFAPSASAFF

SEQ ID NO: 27173 - protein, 11 aa, Severe acute respiratory syndrome coronavirus 2
  REGION 1..11: note = Table C
GMSRIGMEVTP

SEQ ID NO: 27174 - protein, 11 aa, Severe acute respiratory syndrome coronavirus 2
  REGION 1..11: note = Table C
IGMEVTPSGTW

SEQ ID NO: 27175 - protein, 11 aa, Severe acute respiratory syndrome coronavirus 2
  REGION 1..11: note = Table C
EVTPSGTWLTY

SEQ ID NO: 27176 - protein, 11 aa, Severe acute respiratory syndrome coronavirus 2
  REGION 1..11: note = Table C
AYKTFPPTEPK

SEQ ID NO: 27177 - protein, 11 aa, Severe acute respiratory syndrome coronavirus 2
  REGION 1..11: note = Table C
KADETQALPQR

SEQ ID NO: 27178 - protein, 11 aa, Severe acute respiratory syndrome coronavirus 2
  REGION 1..11: note = Table C
ETQALPQRQKK

SEQ ID NO: 27179 - protein, 11 aa, Severe acute respiratory syndrome coronavirus 2
  REGION 1..11: note = Table C
LPQRQKKQQTV

SEQ ID NO: 27180 - protein, 15 aa, Severe acute respiratory syndrome coronavirus 2
  REGION 1..15: note = Spike Wuhan D614G; S_Wu_1_2; Table D
MFVFLVLLPLVSSQC

SEQ ID NO: 27181 - protein, 15 aa, Severe acute respiratory syndrome coronavirus 2
  REGION 1..15: note = Spike Wuhan D614G; S_Wu_1_2; Table D
LVLLPLVSSQCVNLT

SEQ ID NO: 27182 - protein, 15 aa, Severe acute respiratory syndrome coronavirus 2
  REGION 1..15: note = Spike Wuhan D614G; S_Wu_1_2; Table D
PLVSSQCVNLTTRTQ

SEQ ID NO: 27183 - protein, 15 aa, Severe acute respiratory syndrome coronavirus 2
  REGION 1..15: note = Spike Wuhan D614G; S_Wu_1_2; Table D
SQCVNLTTRTQLPPA

SEQ ID NO: 27184 - protein, 15 aa, Severe acute respiratory syndrome coronavirus 2
  REGION 1..15: note = Spike Wuhan D614G; S_Wu_1_2; Table D
NLTTRTQLPPAYTNS

SEQ ID NO: 27185 - protein, 15 aa, Severe acute respiratory syndrome coronavirus 2
  REGION 1..15: note = Spike Wuhan D614G; S_Wu_1_2; Table D
RTQLPPAYTNSFTRG

SEQ ID NO: 27186 - protein, 15 aa, Severe acute respiratory syndrome coronavirus 2
  REGION 1..15: note = Spike Wuhan D614G; S_Wu_1_2; Table D
PPAYTNSFTRGVYYP

SEQ ID NO: 27187 - protein, 15 aa, Severe acute respiratory syndrome coronavirus 2
  REGION 1..15: note = Spike Wuhan D614G; S_Wu_1_2; Table D
TNSFTRGVYYPDKVF

SEQ ID NO: 27188 - protein, 15 aa, Severe acute respiratory syndrome coronavirus 2
  REGION 1..15: note = Spike Wuhan D614G; S_Wu_1_2; Table D
TRGVYYPDKVFRSSV

SEQ ID NO: 27189 - protein, 15 aa, Severe acute respiratory syndrome coronavirus 2
  REGION 1..15: note = Spike Wuhan D614G; S_Wu_1_2; Table D
YYPDKVFRSSVLHST

SEQ ID NO: 27190 - protein, 15 aa, Severe acute respiratory syndrome coronavirus 2
  REGION 1..15: note = Spike Wuhan D614G; S_Wu_1_2; Table D
KVFRSSVLHSTQDLF

SEQ ID NO: 27191 - protein, 15 aa, Severe acute respiratory syndrome coronavirus 2
  REGION 1..15: note = Spike Wuhan D614G; S_Wu_1_2; Table D
SSVLHSTQDLFLPFF

SEQ ID NO: 27192 - protein, 15 aa, Severe acute respiratory syndrome coronavirus 2
  REGION 1..15: note = Spike Wuhan D614G; S_Wu_1_2; Table D
HSTQDLFLPFFSNVT

SEQ ID NO: 27193 - protein, 15 aa, Severe acute respiratory syndrome coronavirus 2
  REGION 1..15: note = Spike Wuhan D614G; S_Wu_1_2; Table D
DLFLPFFSNVTWFHA

SEQ ID NO: 27194 - protein, 15 aa, Severe acute respiratory syndrome coronavirus 2
  REGION 1..15: note = Spike Wuhan D614G; S_Wu_1_2; Table D
PFFSNVTWFHAIHVS

SEQ ID NO: 27195 - protein, 15 aa, Severe acute respiratory syndrome coronavirus 2
  REGION 1..15: note = Spike Wuhan D614G; S_Wu_1_2; Table D
NVTWFHAIHVSGTNG

SEQ ID NO: 27196 - protein, 15 aa, Severe acute respiratory syndrome coronavirus 2
  REGION 1..15: note = Spike Wuhan D614G; S_Wu_1_2; Table D
FHAIHVSGTNGTKRF

SEQ ID NO: 27197 - protein, 15 aa, Severe acute respiratory syndrome coronavirus 2
  REGION 1..15: note = Spike Wuhan D614G; S_Wu_1_2; Table D
HVSGTNGTKRFDNPV

SEQ ID NO: 27198 - protein, 15 aa, Severe acute respiratory syndrome coronavirus 2
  REGION 1..15: note = Spike Wuhan D614G; S_Wu_1_2; Table D
TNGTKRFDNPVLPFN

SEQ ID NO: 27199 - protein, 15 aa, Severe acute respiratory syndrome coronavirus 2
  REGION 1..15: note = Spike Wuhan D614G; S_Wu_1_2; Table D
KRFDNPVLPFNDGVY

SEQ ID NO: 27200 - protein, 15 aa, Severe acute respiratory syndrome coronavirus 2
  REGION 1..15: note = Spike Wuhan D614G; S_Wu_1_2; Table D
NPVLPFNDGVYFAST

SEQ ID NO: 27201 - protein, 15 aa, Severe acute respiratory syndrome coronavirus 2
  REGION 1..15: note = Spike Wuhan D614G; S_Wu_1_2; Table D
PFNDGVYFASTEKSN

SEQ ID NO: 27202 - protein, 15 aa, Severe acute respiratory syndrome coronavirus 2
  REGION 1..15: note = Spike Wuhan D614G; S_Wu_1_2; Table D
GVYFASTEKSNIIRG

SEQ ID NO: 27203 - protein, 15 aa, Severe acute respiratory syndrome coronavirus 2
  REGION 1..15: note = Spike Wuhan D614G; S_Wu_1_2; Table D
ASTEKSNIIRGWIFG

SEQ ID NO: 27204 - protein, 15 aa, Severe acute respiratory syndrome coronavirus 2
  REGION 1..15: note = Spike Wuhan D614G; S_Wu_1_2; Table D
KSNIIRGWIFGTTLD

SEQ ID NO: 27205 - protein, 15 aa, Severe acute respiratory syndrome coronavirus 2
  REGION 1..15: note = Spike Wuhan D614G; S_Wu_1_2; Table D
IRGWIFGTTLDSKTQ

SEQ ID NO: 27206 - protein, 15 aa, Severe acute respiratory syndrome coronavirus 2
  REGION 1..15: note = Spike Wuhan D614G; S_Wu_1_2; Table D
IFGTTLDSKTQSLLI

SEQ ID NO: 27207 - protein, 15 aa, Severe acute respiratory syndrome coronavirus 2
  REGION 1..15: note = Spike Wuhan D614G; S_Wu_1_2; Table D
TLDSKTQSLLIVNNA

SEQ ID NO: 27208 - protein, 15 aa, Severe acute respiratory syndrome coronavirus 2
  REGION 1..15: note = Spike Wuhan D614G; S_Wu_1_2; Table D
KTQSLLIVNNATNVV

SEQ ID NO: 27209 - protein, 15 aa, Severe acute respiratory syndrome coronavirus 2
  REGION 1..15: note = Spike Wuhan D614G; S_Wu_1_2; Table D
LLIVNNATNVVIKVC

SEQ ID NO: 27210 - protein, 15 aa, Severe acute respiratory syndrome coronavirus 2
  REGION 1..15: note = Spike Wuhan D614G; S_Wu_1_2; Table D
NNATNVVIKVCEFQF

SEQ ID NO: 27211 - protein, 15 aa, Severe acute respiratory syndrome coronavirus 2
  REGION 1..15: note = Spike Wuhan D614G; S_Wu_1_2; Table D
NVVIKVCEFQFCNDP

SEQ ID NO: 27212 - protein, 15 aa, Severe acute respiratory syndrome coronavirus 2
  REGION 1..15: note = Spike Wuhan D614G; S_Wu_1_2; Table D
KVCEFQFCNDPFLGV

SEQ ID NO: 27213 - protein, 15 aa, Severe acute respiratory syndrome coronavirus 2
  REGION 1..15: note = Spike Wuhan D614G; S_Wu_1_2; Table D
FQFCNDPFLGVYYHK

SEQ ID NO: 27214 - protein, 15 aa, Severe acute respiratory syndrome coronavirus 2
  REGION 1..15: note = Spike Wuhan D614G; S_Wu_1_2; Table D
NDPFLGVYYHKNNKS

SEQ ID NO: 27215 - protein, 15 aa, Severe acute respiratory syndrome coronavirus 2
  REGION 1..15: note = Spike Wuhan D614G; S_Wu_1_2; Table D
LGVYYHKNNKSWMES

SEQ ID NO: 27216 - protein, 15 aa, Severe acute respiratory syndrome coronavirus 2
  REGION 1..15: note = Spike Wuhan D614G; S_Wu_1_2; Table D
YHKNNKSWMESEFRV

SEQ ID NO: 27217 - protein, 15 aa, Severe acute respiratory syndrome coronavirus 2
  REGION 1..15: note = Spike Wuhan D614G; S_Wu_1_2; Table D
NKSWMESEFRVYSSA

SEQ ID NO: 27218 - protein, 15 aa, Severe acute respiratory syndrome coronavirus 2
  REGION 1..15: note = Spike Wuhan D614G; S_Wu_1_2; Table D
MESEFRVYSSANNCT

SEQ ID NO: 27219 - protein, 15 aa, Severe acute respiratory syndrome coronavirus 2
  REGION 1..15: note = Spike Wuhan D614G; S_Wu_1_2; Table D
FRVYSSANNCTFEYV

SEQ ID NO: 27220 - protein, 15 aa, Severe acute respiratory syndrome coronavirus 2
  REGION 1..15: note = Spike Wuhan D614G; S_Wu_1_2; Table D
SSANNCTFEYVSQPF

SEQ ID NO: 27221 - protein, 15 aa, Severe acute respiratory syndrome coronavirus 2
  REGION 1..15: note = Spike Wuhan D614G; S_Wu_1_2; Table D
NCTFEYVSQPFLMDL

SEQ ID NO: 27222 - protein, 15 aa, Severe acute respiratory syndrome coronavirus 2
  REGION 1..15: note = Spike Wuhan D614G; S_Wu_1_2; Table D
EYVSQPFLMDLEGKQ

SEQ ID NO: 27223 - protein, 15 aa, Severe acute respiratory syndrome coronavirus 2
  REGION 1..15: note = Spike Wuhan D614G; S_Wu_1_2; Table D
QPFLMDLEGKQGNFK

SEQ ID NO: 27224 - protein, 15 aa, Severe acute respiratory syndrome coronavirus 2
  REGION 1..15: note = Spike Wuhan D614G; S_Wu_1_2; Table D
MDLEGKQGNFKNLRE

SEQ ID NO: 27225 - protein, 15 aa, Severe acute respiratory syndrome coronavirus 2
  REGION 1..15: note = Spike Wuhan D614G; S_Wu_1_2; Table D
GKQGNFKNLREFVFK

SEQ ID NO: 27226 - protein, 15 aa, Severe acute respiratory syndrome coronavirus 2
  REGION 1..15: note = Spike Wuhan D614G; S_Wu_1_2; Table D
NFKNLREFVFKNIDG

SEQ ID NO: 27227 - protein, 15 aa, Severe acute respiratory syndrome coronavirus 2
  REGION 1..15: note = Spike Wuhan D614G; S_Wu_1_2; Table D
LREFVFKNIDGYFKI

SEQ ID NO: 27228 - protein, 15 aa, Severe acute respiratory syndrome coronavirus 2
  REGION 1..15: note = Spike Wuhan D614G; S_Wu_1_2; Table D
VFKNIDGYFKIYSKH

SEQ ID NO: 27229 - protein, 15 aa, Severe acute respiratory syndrome coronavirus 2
  REGION 1..15: note = Spike Wuhan D614G; S_Wu_1_2; Table D
IDGYFKIYSKHTPIN

SEQ ID NO: 27230 - protein, 15 aa, Severe acute respiratory syndrome coronavirus 2
  REGION 1..15: note = Spike Wuhan D614G; S_Wu_1_2; Table D
FKIYSKHTPINLVRD

SEQ ID NO: 27231 - protein, 15 aa, Severe acute respiratory syndrome coronavirus 2
  REGION 1..15: note = Spike Wuhan D614G; S_Wu_1_2; Table D
SKHTPINLVRDLPQG

SEQ ID NO: 27232 - protein, 15 aa, Severe acute respiratory syndrome coronavirus 2
  REGION 1..15: note = Spike Wuhan D614G; S_Wu_1_2; Table D
PINLVRDLPQGFSAL

SEQ ID NO: 27233 - protein, 15 aa, Severe acute respiratory syndrome coronavirus 2
  REGION 1..15: note = Spike Wuhan D614G; S_Wu_1_2; Table D
VRDLPQGFSALEPLV

SEQ ID NO: 27234 - protein, 15 aa, Severe acute respiratory syndrome coronavirus 2
  REGION 1..15: note = Spike Wuhan D614G; S_Wu_1_2; Table D
PQGFSALEPLVDLPI

SEQ ID NO: 27235 - protein, 15 aa, Severe acute respiratory syndrome coronavirus 2
  REGION 1..15: note = Spike Wuhan D614G; S_Wu_1_2; Table D
SALEPLVDLPIGINI

SEQ ID NO: 27236 - protein, 15 aa, Severe acute respiratory syndrome coronavirus 2
  REGION 1..15: note = Spike Wuhan D614G; S_Wu_1_2; Table D
PLVDLPIGINITRFQ

SEQ ID NO: 27237 - protein, 15 aa, Severe acute respiratory syndrome coronavirus 2
  REGION 1..15: note = Spike Wuhan D614G; S_Wu_1_2; Table D
LPIGINITRFQTLLA

SEQ ID NO: 27238 - protein, 15 aa, Severe acute respiratory syndrome coronavirus 2
  REGION 1..15: note = Spike Wuhan D614G; S_Wu_1_2; Table D
INITRFQTLLALHRS

SEQ ID NO: 27239 - protein, 15 aa, Severe acute respiratory syndrome coronavirus 2
  REGION 1..15: note = Spike Wuhan D614G; S_Wu_1_2; Table D
RFQTLLALHRSYLTP

SEQ ID NO: 27240 - protein, 15 aa, Severe acute respiratory syndrome coronavirus 2
  REGION 1..15: note = Spike Wuhan D614G; S_Wu_1_2; Table D
LLALHRSYLTPGDSS

SEQ ID NO: 27241 - protein, 15 aa, Severe acute respiratory syndrome coronavirus 2
  REGION 1..15: note = Spike Wuhan D614G; S_Wu_1_2; Table D
HRSYLTPGDSSSGWT

SEQ ID NO: 27242 - protein, 15 aa, Severe acute respiratory syndrome coronavirus 2
  REGION 1..15: note = Spike Wuhan D614G; S_Wu_1_2; Table D
LTPGDSSSGWTAGAA

SEQ ID NO: 27243 - protein, 15 aa, Severe acute respiratory syndrome coronavirus 2
  REGION 1..15: note = Spike Wuhan D614G; S_Wu_1_2; Table D
DSSSGWTAGAAAYYV

SEQ ID NO: 27244 - protein, 15 aa, Severe acute respiratory syndrome coronavirus 2
  REGION 1..15: note = Spike Wuhan D614G; S_Wu_1_2; Table D
GWTAGAAAYYVGYLQ

SEQ ID NO: 27245 - protein, 15 aa, Severe acute respiratory syndrome coronavirus 2
  REGION 1..15: note = Spike Wuhan D614G; S_Wu_1_2; Table D
GAAAYYVGYLQPRTF

SEQ ID NO: 27246 - protein, 15 aa, Severe acute respiratory syndrome coronavirus 2
  REGION 1..15: note = Spike Wuhan D614G; S_Wu_1_2; Table D
YYVGYLQPRTFLLKY

SEQ ID NO: 27247 - protein, 15 aa, Severe acute respiratory syndrome coronavirus 2
  REGION 1..15: note = Spike Wuhan D614G; S_Wu_1_2; Table D
YLQPRTFLLKYNENG

SEQ ID NO: 27248 - protein, 15 aa, Severe acute respiratory syndrome coronavirus 2
  REGION 1..15: note = Spike Wuhan D614G; S_Wu_1_2; Table D
RTFLLKYNENGTITD

SEQ ID NO: 27249 - protein, 15 aa, Severe acute respiratory syndrome coronavirus 2
  REGION 1..15: note = Spike Wuhan D614G; S_Wu_1_2; Table D
LKYNENGTITDAVDC

SEQ ID NO: 27250 - protein, 15 aa, Severe acute respiratory syndrome coronavirus 2
  REGION 1..15: note = Spike Wuhan D614G; S_Wu_1_2; Table D
ENGTITDAVDCALDP

SEQ ID NO: 27251 - protein, 15 aa, Severe acute respiratory syndrome coronavirus 2
  REGION 1..15: note = Spike Wuhan D614G; S_Wu_1_2; Table D
ITDAVDCALDPLSET

SEQ ID NO: 27252 - protein, 15 aa, Severe acute respiratory syndrome coronavirus 2
  REGION 1..15: note = Spike Wuhan D614G; S_Wu_1_2; Table D
VDCALDPLSETKCTL

SEQ ID NO: 27253 - protein, 15 aa, Severe acute respiratory syndrome coronavirus 2
  REGION 1..15: note = Spike Wuhan D614G; S_Wu_1_2; Table D
LDPLSETKCTLKSFT

SEQ ID NO: 27254 - protein, 15 aa, Severe acute respiratory syndrome coronavirus 2
  REGION 1..15: note = Spike Wuhan D614G; S_Wu_1_2; Table D
SETKCTLKSFTVEKG

SEQ ID NO: 27255 - protein, 15 aa, Severe acute respiratory syndrome coronavirus 2
  REGION 1..15: note = Spike Wuhan D614G; S_Wu_1_2; Table D
CTLKSFTVEKGIYQT

SEQ ID NO: 27256 - protein, 15 aa, Severe acute respiratory syndrome coronavirus 2
  REGION 1..15: note = Spike Wuhan D614G; S_Wu_1_2; Table D
SFTVEKGIYQTSNFR

SEQ ID NO: 27257 - protein, 15 aa, Severe acute respiratory syndrome coronavirus 2
  REGION 1..15: note = Spike Wuhan D614G; S_Wu_1_2; Table D
EKGIYQTSNFRVQPT

SEQ ID NO: 27258 - protein, 15 aa, Severe acute respiratory syndrome coronavirus 2
  REGION 1..15: note = Spike Wuhan D614G; S_Wu_1_2; Table D
YQTSNFRVQPTESIV

SEQ ID NO: 27259 - protein, 15 aa, Severe acute respiratory syndrome coronavirus 2
  REGION 1..15: note = Spike Wuhan D614G; S_Wu_1_2; Table D
NFRVQPTESIVRFPN

SEQ ID NO: 27260 - protein, 15 aa, Severe acute respiratory syndrome coronavirus 2
  REGION 1..15: note = Spike Wuhan D614G; S_Wu_3_4; Table D
QPTESIVRFPNITNL

SEQ ID NO: 27261 - protein, 15 aa, Severe acute respiratory syndrome coronavirus 2
  REGION 1..15: note = Spike Wuhan D614G; S_Wu_3_4; Table D
SIVRFPNITNLCPFG

SEQ ID NO: 27262 - protein, 15 aa, Severe acute respiratory syndrome coronavirus 2
  REGION 1..15: note = Spike Wuhan D614G; S_Wu_3_4; Table D
FPNITNLCPFGEVFN

SEQ ID NO: 27263 - protein, 15 aa, Severe acute respiratory syndrome coronavirus 2
  REGION 1..15: note = Spike Wuhan D614G; S_Wu_3_4; Table D
TNLCPFGEVFNATRF

SEQ ID NO: 27264 - protein, 15 aa, Severe acute respiratory syndrome coronavirus 2
  REGION 1..15: note = Spike Wuhan D614G; S_Wu_3_4; Table D
PFGEVFNATRFASVY

SEQ ID NO: 27265 - protein, 15 aa, Severe acute respiratory syndrome coronavirus 2
  REGION 1..15: note = Spike Wuhan D614G; S_Wu_3_4; Table D
VFNATRFASVYAWNR

SEQ ID NO: 27266 - protein, 15 aa, Severe acute respiratory syndrome coronavirus 2
  REGION 1..15: note = Spike Wuhan D614G; S_Wu_3_4; Table D
TRFASVYAWNRKRIS

SEQ ID NO: 27267 - protein, 15 aa, Severe acute respiratory syndrome coronavirus 2
  REGION 1..15: note = Spike Wuhan D614G; S_Wu_3_4; Table D
SVYAWNRKRISNCVA

SEQ ID NO: 27268 - protein, 15 aa, Severe acute respiratory syndrome coronavirus 2
  REGION 1..15: note = Spike Wuhan D614G; S_Wu_3_4; Table D
WNRKRISNCVADYSV

SEQ ID NO: 27269 - protein, 15 aa, Severe acute respiratory syndrome coronavirus 2
  REGION 1..15: note = Spike Wuhan D614G; S_Wu_3_4; Table D
RISNCVADYSVLYNS

SEQ ID NO: 27270 - protein, 15 aa, Severe acute respiratory syndrome coronavirus 2
  REGION 1..15: note = Spike Wuhan D614G; S_Wu_3_4; Table D
CVADYSVLYNSASFS

SEQ ID NO: 27271 - protein, 15 aa, Severe acute respiratory syndrome coronavirus 2
  REGION 1..15: note = Spike Wuhan D614G; S_Wu_3_4; Table D
YSVLYNSASFSTFKC

SEQ ID NO: 27272 - protein, 15 aa, Severe acute respiratory syndrome coronavirus 2
  REGION 1..15: note = Spike Wuhan D614G; S_Wu_3_4; Table D
YNSASFSTFKCYGVS

SEQ ID NO: 27273 - protein, 15 aa, Severe acute respiratory syndrome coronavirus 2
  REGION 1..15: note = Spike Wuhan D614G; S_Wu_3_4; Table D
SFSTFKCYGVSPTKL

SEQ ID NO: 27274 - protein, 15 aa, Severe acute respiratory syndrome coronavirus 2
  REGION 1..15: note = Spike Wuhan D614G; S_Wu_3_4; Table D
FKCYGVSPTKLNDLC

SEQ ID NO: 27275 - protein, 15 aa, Severe acute respiratory syndrome coronavirus 2
  REGION 1..15: note = Spike Wuhan D614G; S_Wu_3_4; Table D
GVSPTKLNDLCFTNV

SEQ ID NO: 27276 - protein, 15 aa, Severe acute respiratory syndrome coronavirus 2
  REGION 1..15: note = Spike Wuhan D614G; S_Wu_3_4; Table D
TKLNDLCFTNVYADS

SEQ ID NO: 27277 - protein, 15 aa, Severe acute respiratory syndrome coronavirus 2
  REGION 1..15: note = Spike Wuhan D614G; S_Wu_3_4; Table D
DLCFTNVYADSFVIR

SEQ ID NO: 27278 - protein, 15 aa, Severe acute respiratory syndrome coronavirus 2
  REGION 1..15: note = Spike Wuhan D614G; S_Wu_3_4; Table D
TNVYADSFVIRGDEV

SEQ ID NO: 27279 - protein, 15 aa, Severe acute respiratory syndrome coronavirus 2
  REGION 1..15: note = Spike Wuhan D614G; S_Wu_3_4; Table D
ADSFVIRGDEVRQIA

SEQ ID NO: 27280 - protein, 15 aa, Severe acute respiratory syndrome coronavirus 2
  REGION 1..15: note = Spike Wuhan D614G; S_Wu_3_4; Table D
VIRGDEVRQIAPGQT

SEQ ID NO: 27281 - protein, 15 aa, Severe acute respiratory syndrome coronavirus 2
  REGION 1..15: note = Spike Wuhan D614G; S_Wu_3_4; Table D
DEVRQIAPGQTGKIA

SEQ ID NO: 27282 - protein, 15 aa, Severe acute respiratory syndrome coronavirus 2
  REGION 1..15: note = Spike Wuhan D614G; S_Wu_3_4; Table D
QIAPGQTGKIADYNY

SEQ ID NO: 27283 - protein, 15 aa, Severe acute respiratory syndrome coronavirus 2
  REGION 1..15: note = Spike Wuhan D614G; S_Wu_3_4; Table D
GQTGKIADYNYKLPD

SEQ ID NO: 27284 - protein, 15 aa, Severe acute respiratory syndrome coronavirus 2
  REGION 1..15: note = Spike Wuhan D614G; S_Wu_3_4; Table D
KIADYNYKLPDDFTG

SEQ ID NO: 27285 - protein, 15 aa, Severe acute respiratory syndrome coronavirus 2
  REGION 1..15: note = Spike Wuhan D614G; S_Wu_3_4; Table D
YNYKLPDDFTGCVIA

SEQ ID NO: 27286 - protein, 15 aa, Severe acute respiratory syndrome coronavirus 2
  REGION 1..15: note = Spike Wuhan D614G; S_Wu_3_4; Table D
LPDDFTGCVIAWNSN

SEQ ID NO: 27287 - protein, 15 aa, Severe acute respiratory syndrome coronavirus 2
  REGION 1..15: note = Spike Wuhan D614G; S_Wu_3_4; Table D
FTGCVIAWNSNNLDS

SEQ ID NO: 27288 - protein, 15 aa, Severe acute respiratory syndrome coronavirus 2
  REGION 1..15: note = Spike Wuhan D614G; S_Wu_3_4; Table D
VIAWNSNNLDSKVGG

SEQ ID NO: 27289 - protein, 15 aa, Severe acute respiratory syndrome coronavirus 2
  REGION 1..15: note = Spike Wuhan D614G; S_Wu_3_4; Table D
NSNNLDSKVGGNYNY

SEQ ID NO: 27290 - protein, 15 aa, Severe acute respiratory syndrome coronavirus 2
  REGION 1..15: note = Spike Wuhan D614G; S_Wu_3_4; Table D
LDSKVGGNYNYLYRL

SEQ ID NO: 27291 - protein, 15 aa, Severe acute respiratory syndrome coronavirus 2
  REGION 1..15: note = Spike Wuhan D614G; S_Wu_3_4; Table D
VGGNYNYLYRLFRKS

SEQ ID NO: 27292 - protein, 15 aa, Severe acute respiratory syndrome coronavirus 2
  REGION 1..15: note = Spike Wuhan D614G; S_Wu_3_4; Table D
YNYLYRLFRKSNLKP

SEQ ID NO: 27293 - protein, 15 aa, Severe acute respiratory syndrome coronavirus 2
  REGION 1..15: note = Spike Wuhan D614G; S_Wu_3_4; Table D
YRLFRKSNLKPFERD

SEQ ID NO: 27294 - protein, 15 aa, Severe acute respiratory syndrome coronavirus 2
  REGION 1..15: note = Spike Wuhan D614G; S_Wu_3_4; Table D
RKSNLKPFERDISTE

SEQ ID NO: 27295 - protein, 15 aa, Severe acute respiratory syndrome coronavirus 2
  REGION 1..15: note = Spike Wuhan D614G; S_Wu_3_4; Table D
LKPFERDISTEIYQA

SEQ ID NO: 27296 - protein, 15 aa, Severe acute respiratory syndrome coronavirus 2
  REGION 1..15: note = Spike Wuhan D614G; S_Wu_3_4; Table D
ERDISTEIYQAGSTP

SEQ ID NO: 27297 - protein, 15 aa, Severe acute respiratory syndrome coronavirus 2
  REGION 1..15: note = Spike Wuhan D614G; S_Wu_3_4; Table D
STEIYQAGSTPCNGV

SEQ ID NO: 27298 - protein, 15 aa, Severe acute respiratory syndrome coronavirus 2
  REGION 1..15: note = Spike Wuhan D614G; S_Wu_3_4; Table D
YQAGSTPCNGVEGFN

SEQ ID NO: 27299 - protein, 15 aa, Severe acute respiratory syndrome coronavirus 2
  REGION 1..15: note = Spike Wuhan D614G; S_Wu_3_4; Table D
STPCNGVEGFNCYFP

SEQ ID NO: 27300 - protein, 15 aa, Severe acute respiratory syndrome coronavirus 2
  REGION 1..15: note = Spike Wuhan D614G; S_Wu_3_4; Table D
NGVEGFNCYFPLQSY

SEQ ID NO: 27301 - protein, 15 aa, Severe acute respiratory syndrome coronavirus 2
  REGION 1..15: note = Spike Wuhan D614G; S_Wu_3_4; Table D
GFNCYFPLQSYGFQP

SEQ ID NO: 27302 - protein, 15 aa, Severe acute respiratory syndrome coronavirus 2
  REGION 1..15: note = Spike Wuhan D614G; S_Wu_3_4; Table D
YFPLQSYGFQPTNGV

SEQ ID NO: 27303 - protein, 15 aa, Severe acute respiratory syndrome coronavirus 2
  REGION 1..15: note = Spike Wuhan D614G; S_Wu_3_4; Table D
QSYGFQPTNGVGYQP

SEQ ID NO: 27304 - protein, 15 aa, Severe acute respiratory syndrome coronavirus 2
  REGION 1..15: note = Spike Wuhan D614G; S_Wu_3_4; Table D
FQPTNGVGYQPYRVV

SEQ ID NO: 27305 - protein, 15 aa, Severe acute respiratory syndrome coronavirus 2
  REGION 1..15: note = Spike Wuhan D614G; S_Wu_3_4; Table D
NGVGYQPYRVVVLSF

SEQ ID NO: 27306 - protein, 15 aa, Severe acute respiratory syndrome coronavirus 2
  REGION 1..15: note = Spike Wuhan D614G; S_Wu_3_4; Table D
YQPYRVVVLSFELLH

SEQ ID NO: 27307 - protein, 15 aa, Severe acute respiratory syndrome coronavirus 2
  REGION 1..15: note = Spike Wuhan D614G; S_Wu_3_4; Table D
RVVVLSFELLHAPAT

SEQ ID NO: 27308 - protein, 15 aa, Severe acute respiratory syndrome coronavirus 2
  REGION 1..15: note = Spike Wuhan D614G; S_Wu_3_4; Table D
LSFELLHAPATVCGP

SEQ ID NO: 27309 - protein, 15 aa, Severe acute respiratory syndrome coronavirus 2
  REGION 1..15: note = Spike Wuhan D614G; S_Wu_3_4; Table D
LLHAPATVCGPKKST

SEQ ID NO: 27310 - protein, 15 aa, Severe acute respiratory syndrome coronavirus 2
  REGION 1..15: note = Spike Wuhan D614G; S_Wu_3_4; Table D
PATVCGPKKSTNLVK

SEQ ID NO: 27311 - protein, 15 aa, Severe acute respiratory syndrome coronavirus 2
  REGION 1..15: note = Spike Wuhan D614G; S_Wu_3_4; Table D
CGPKKSTNLVKNKCV

SEQ ID NO: 27312 - protein, 15 aa, Severe acute respiratory syndrome coronavirus 2
  REGION 1..15: note = Spike Wuhan D614G; S_Wu_3_4; Table D
KSTNLVKNKCVNFNF

SEQ ID NO: 27313 - protein, 15 aa, Severe acute respiratory syndrome coronavirus 2
  REGION 1..15: note = Spike Wuhan D614G; S_Wu_3_4; Table D
LVKNKCVNFNFNGLT

SEQ ID NO: 27314 - protein, 15 aa, Severe acute respiratory syndrome coronavirus 2
  REGION 1..15: note = Spike Wuhan D614G; S_Wu_3_4; Table D
KCVNFNFNGLTGTGV

SEQ ID NO: 27315 - protein, 15 aa, Severe acute respiratory syndrome coronavirus 2
  REGION 1..15: note = Spike Wuhan D614G; S_Wu_3_4; Table D
FNFNGLTGTGVLTES

SEQ ID NO: 27316 - protein, 15 aa, Severe acute respiratory syndrome coronavirus 2
  REGION 1..15: note = Spike Wuhan D614G; S_Wu_3_4; Table D
GLTGTGVLTESNKKF

SEQ ID NO: 27317 - protein, 15 aa, Severe acute respiratory syndrome coronavirus 2
  REGION 1..15: note = Spike Wuhan D614G; S_Wu_3_4; Table D
TGVLTESNKKFLPFQ

SEQ ID NO: 27318 - protein, 15 aa, Severe acute respiratory syndrome coronavirus 2
  REGION 1..15: note = Spike Wuhan D614G; S_Wu_3_4; Table D
TESNKKFLPFQQFGR

SEQ ID NO: 27319 - protein, 15 aa, Severe acute respiratory syndrome coronavirus 2
  REGION 1..15: note = Spike Wuhan D614G; S_Wu_3_4; Table D
KKFLPFQQFGRDIAD

SEQ ID NO: 27320 - protein, 15 aa, Severe acute respiratory syndrome coronavirus 2
  REGION 1..15: note = Spike Wuhan D614G; S_Wu_3_4; Table D
PFQQFGRDIADTTDA

SEQ ID NO: 27321 - protein, 15 aa, Severe acute respiratory syndrome coronavirus 2
  REGION 1..15: note = Spike Wuhan D614G; S_Wu_3_4; Table D
FGRDIADTTDAVRDP

SEQ ID NO: 27322 - protein, 15 aa, Severe acute respiratory syndrome coronavirus 2
  REGION 1..15: note = Spike Wuhan D614G; S_Wu_3_4; Table D
IADTTDAVRDPQTLE

SEQ ID NO: 27323 - protein, 15 aa, Severe acute respiratory syndrome coronavirus 2
  REGION 1..15: note = Spike Wuhan D614G; S_Wu_3_4; Table D
TDAVRDPQTLEILDI

SEQ ID NO: 27324 - protein, 15 aa, Severe acute respiratory syndrome coronavirus 2
  REGION 1..15: note = Spike Wuhan D614G; S_Wu_3_4; Table D
RDPQTLEILDITPCS

SEQ ID NO: 27325 - protein, 15 aa, Severe acute respiratory syndrome coronavirus 2
  REGION 1..15: note = Spike Wuhan D614G; S_Wu_3_4; Table D
TLEILDITPCSFGGV

SEQ ID NO: 27326 - protein, 15 aa, Severe acute respiratory syndrome coronavirus 2
  REGION 1..15: note = Spike Wuhan D614G; S_Wu_3_4; Table D
LDITPCSFGGVSVIT

SEQ ID NO: 27327 - protein, 15 aa, Severe acute respiratory syndrome coronavirus 2
  REGION 1..15: note = Spike Wuhan D614G; S_Wu_3_4; Table D
PCSFGGVSVITPGTN

SEQ ID NO: 27328 - protein, 15 aa, Severe acute respiratory syndrome coronavirus 2
  REGION 1..15: note = Spike Wuhan D614G; S_Wu_3_4; Table D
GGVSVITPGTNTSNQ

SEQ ID NO: 27329 - protein, 15 aa, Severe acute respiratory syndrome coronavirus 2
  REGION 1..15: note = Spike Wuhan D614G; S_Wu_3_4; Table D
VITPGTNTSNQVAVL

SEQ ID NO: 27330 - protein, 15 aa, Severe acute respiratory syndrome coronavirus 2
  REGION 1..15: note = Spike Wuhan D614G; S_Wu_3_4; Table D
GTNTSNQVAVLYQGV

SEQ ID NO: 27331 - protein, 15 aa, Severe acute respiratory syndrome coronavirus 2
  REGION 1..15: note = Spike Wuhan D614G; S_Wu_3_4; Table D
SNQVAVLYQGVNCTE

SEQ ID NO: 27332 - protein, 15 aa, Severe acute respiratory syndrome coronavirus 2
  REGION 1..15: note = Spike Wuhan D614G; S_Wu_3_4; Table D
AVLYQGVNCTEVPVA

SEQ ID NO: 27333 - protein, 15 aa, Severe acute respiratory syndrome coronavirus 2
  REGION 1..15: note = Spike Wuhan D614G; S_Wu_3_4; Table D
QGVNCTEVPVAIHAD

SEQ ID NO: 27334 - protein, 15 aa, Severe acute respiratory syndrome coronavirus 2
  REGION 1..15: note = Spike Wuhan D614G; S_Wu_3_4; Table D
CTEVPVAIHADQLTP

SEQ ID NO: 27335 - protein, 15 aa, Severe acute respiratory syndrome coronavirus 2
  REGION 1..15: note = Spike Wuhan D614G; S_Wu_3_4; Table D
PVAIHADQLTPTWRV

SEQ ID NO: 27336 - protein, 15 aa, Severe acute respiratory syndrome coronavirus 2
  REGION 1..15: note = Spike Wuhan D614G; S_Wu_3_4; Table D
HADQLTPTWRVYSTG

SEQ ID NO: 27337 - protein, 15 aa, Severe acute respiratory syndrome coronavirus 2
  REGION 1..15: note = Spike Wuhan D614G; S_Wu_3_4; Table D
LTPTWRVYSTGSNVF

SEQ ID NO: 27338 - protein, 15 aa, Severe acute respiratory syndrome coronavirus 2
  REGION 1..15: note = Spike Wuhan D614G; S_Wu_3_4; Table D
WRVYSTGSNVFQTRA

SEQ ID NO: 27339 - protein, 15 aa, Severe acute respiratory syndrome coronavirus 2
  REGION 1..15: note = Spike Wuhan D614G; S_Wu_3_4; Table D
STGSNVFQTRAGCLI

SEQ ID NO: 27340 - protein, 15 aa, Severe acute respiratory syndrome coronavirus 2
  REGION 1..15: note = Spike Wuhan D614G; S_Wu_5_6; Table D
NVFQTRAGCLIGAEH

SEQ ID NO: 27341 - protein, 15 aa, Severe acute respiratory syndrome coronavirus 2
  REGION 1..15: note = Spike Wuhan D614G; S_Wu_5_6; Table D
TRAGCLIGAEHVNNS

SEQ ID NO: 27342 - protein, 15 aa, Severe acute respiratory syndrome coronavirus 2
  REGION 1..15: note = Spike Wuhan D614G; S_Wu_5_6; Table D
CLIGAEHVNNSYECD

SEQ ID NO: 27343 - protein, 15 aa, Severe acute respiratory syndrome coronavirus 2
  REGION 1..15: note = Spike Wuhan D614G; S_Wu_5_6; Table D
AEHVNNSYECDIPIG

SEQ ID NO: 27344 - protein, 15 aa, Severe acute respiratory syndrome coronavirus 2
  REGION 1..15: note = Spike Wuhan D614G; S_Wu_5_6; Table D
NNSYECDIPIGAGIC

SEQ ID NO: 27345 - protein, 15 aa, Severe acute respiratory syndrome coronavirus 2
  REGION 1..15: note = Spike Wuhan D614G; S_Wu_5_6; Table D
ECDIPIGAGICASYQ

SEQ ID NO: 27346 - protein, 15 aa, Severe acute respiratory syndrome coronavirus 2
  REGION 1..15: note = Spike Wuhan D614G; S_Wu_5_6; Table D
PIGAGICASYQTQTN

SEQ ID NO: 27347 - protein, 15 aa, Severe acute respiratory syndrome coronavirus 2
  REGION 1..15: note = Spike Wuhan D614G; S_Wu_5_6; Table D
GICASYQTQTNSPRR

SEQ ID NO: 27348 - protein, 15 aa, Severe acute respiratory syndrome coronavirus 2
  REGION 1..15: note = Spike Wuhan D614G; S_Wu_5_6; Table D
SYQTQTNSPRRARSV

SEQ ID NO: 27349 - protein, 15 aa, Severe acute respiratory syndrome coronavirus 2
  REGION 1..15: note = Spike Wuhan D614G; S_Wu_5_6; Table D
QTNSPRRARSVASQS

SEQ ID NO: 27350 - protein, 15 aa, Severe acute respiratory syndrome coronavirus 2
  REGION 1..15: note = Spike Wuhan D614G; S_Wu_5_6; Table D
PRRARSVASQSIIAY

SEQ ID NO: 27351 - protein, 15 aa, Severe acute respiratory syndrome coronavirus 2
  REGION 1..15: note = Spike Wuhan D614G; S_Wu_5_6; Table D
RSVASQSIIAYTMSL

SEQ ID NO: 27352 - protein, 15 aa, Severe acute respiratory syndrome coronavirus 2
  REGION 1..15: note = Spike Wuhan D614G; S_Wu_5_6; Table D
SQSIIAYTMSLGAEN

SEQ ID NO: 27353 - protein, 15 aa, Severe acute respiratory syndrome coronavirus 2
  REGION 1..15: note = Spike Wuhan D614G; S_Wu_5_6; Table D
IAYTMSLGAENSVAY

SEQ ID NO: 27354 - protein, 15 aa, Severe acute respiratory syndrome coronavirus 2
  REGION 1..15: note = Spike Wuhan D614G; S_Wu_5_6; Table D
MSLGAENSVAYSNNS

SEQ ID NO: 27355 - protein, 15 aa, Severe acute respiratory syndrome coronavirus 2
  REGION 1..15: note = Spike Wuhan D614G; S_Wu_5_6; Table D
AENSVAYSNNSIAIP

SEQ ID NO: 27356 - protein, 15 aa, Severe acute respiratory syndrome coronavirus 2
  REGION 1..15: note = Spike Wuhan D614G; S_Wu_5_6; Table D
VAYSNNSIAIPTNFT

SEQ ID NO: 27357 - protein, 15 aa, Severe acute respiratory syndrome coronavirus 2
  REGION 1..15: note = Spike Wuhan D614G; S_Wu_5_6; Table D
NNSIAIPTNFTISVT

SEQ ID NO: 27358 - protein, 15 aa, Severe acute respiratory syndrome coronavirus 2
  REGION 1..15: note = Spike Wuhan D614G; S_Wu_5_6; Table D
AIPTNFTISVTTEIL

SEQ ID NO: 27359 - protein, 15 aa, Severe acute respiratory syndrome coronavirus 2
  REGION 1..15: note = Spike Wuhan D614G; S_Wu_5_6; Table D
NFTISVTTEILPVSM

SEQ ID NO: 27360 - protein, 15 aa, Severe acute respiratory syndrome coronavirus 2
  REGION 1..15: note = Spike Wuhan D614G; S_Wu_5_6; Table D
SVTTEILPVSMTKTS

SEQ ID NO: 27361 - protein, 15 aa, Severe acute respiratory syndrome coronavirus 2
  REGION 1..15: note = Spike Wuhan D614G; S_Wu_5_6; Table D
EILPVSMTKTSVDCT

SEQ ID NO: 27362 - protein, 15 aa, Severe acute respiratory syndrome coronavirus 2
  REGION 1..15: note = Spike Wuhan D614G; S_Wu_5_6; Table D
VSMTKTSVDCTMYIC

SEQ ID NO: 27363 - protein, 15 aa, Severe acute respiratory syndrome coronavirus 2
  REGION 1..15: note = Spike Wuhan D614G; S_Wu_5_6; Table D
KTSVDCTMYICGDST

SEQ ID NO: 27364 - protein, 15 aa, Severe acute respiratory syndrome coronavirus 2
  REGION 1..15: note = Spike Wuhan D614G; S_Wu_5_6; Table D
DCTMYICGDSTECSN

SEQ ID NO: 27365 - protein, 15 aa, Severe acute respiratory syndrome coronavirus 2
  REGION 1..15: note = Spike Wuhan D614G; S_Wu_5_6; Table D
YICGDSTECSNLLLQ

SEQ ID NO: 27366 - protein, 15 aa, Severe acute respiratory syndrome coronavirus 2
  REGION 1..15: note = Spike Wuhan D614G; S_Wu_5_6; Table D
DSTECSNLLLQYGSF

SEQ ID NO: 27367 - protein, 15 aa, Severe acute respiratory syndrome coronavirus 2
  REGION 1..15: note = Spike Wuhan D614G; S_Wu_5_6; Table D
CSNLLLQYGSFCTQL

SEQ ID NO: 27368 - protein, 15 aa, Severe acute respiratory syndrome coronavirus 2
  REGION 1..15: note = Spike Wuhan D614G; S_Wu_5_6; Table D
LLQYGSFCTQLNRAL

SEQ ID NO: 27369 - protein, 15 aa, Severe acute respiratory syndrome coronavirus 2
  REGION 1..15: note = Spike Wuhan D614G; S_Wu_5_6; Table D
GSFCTQLNRALTGIA

SEQ ID NO: 27370 - protein, 15 aa, Severe acute respiratory syndrome coronavirus 2
  REGION 1..15: note = Spike Wuhan D614G; S_Wu_5_6; Table D
TQLNRALTGIAVEQD

SEQ ID NO: 27371 - protein, 15 aa, Severe acute respiratory syndrome coronavirus 2
  REGION 1..15: note = Spike Wuhan D614G; S_Wu_5_6; Table D
RALTGIAVEQDKNTQ

SEQ ID NO: 27372 - protein, 15 aa, Severe acute respiratory syndrome coronavirus 2
  REGION 1..15: note = Spike Wuhan D614G; S_Wu_5_6; Table D
GIAVEQDKNTQEVFA

SEQ ID NO: 27373 - protein, 15 aa, Severe acute respiratory syndrome coronavirus 2
  REGION 1..15: note = Spike Wuhan D614G; S_Wu_5_6; Table D
EQDKNTQEVFAQVKQ

SEQ ID NO: 27374 - protein, 15 aa, Severe acute respiratory syndrome coronavirus 2
  REGION 1..15: note = Spike Wuhan D614G; S_Wu_5_6; Table D
NTQEVFAQVKQIYKT

SEQ ID NO: 27375 - protein, 15 aa, Severe acute respiratory syndrome coronavirus 2
  REGION 1..15: note = Spike Wuhan D614G; S_Wu_5_6; Table D
VFAQVKQIYKTPPIK

SEQ ID NO: 27376 - protein, 15 aa, Severe acute respiratory syndrome coronavirus 2
  REGION 1..15: note = Spike Wuhan D614G; S_Wu_5_6; Table D
VKQIYKTPPIKDFGG

SEQ ID NO: 27377 - protein, 15 aa, Severe acute respiratory syndrome coronavirus 2
  REGION 1..15: note = Spike Wuhan D614G; S_Wu_5_6; Table D
YKTPPIKDFGGFNFS

SEQ ID NO: 27378 - protein, 15 aa, Severe acute respiratory syndrome coronavirus 2
  REGION 1..15: note = Spike Wuhan D614G; S_Wu_5_6; Table D
PIKDFGGFNFSQILP

SEQ ID NO: 27379 - protein, 15 aa, Severe acute respiratory syndrome coronavirus 2
  REGION 1..15: note = Spike Wuhan D614G; S_Wu_5_6; Table D
FGGFNFSQILPDPSK

SEQ ID NO: 27380 - protein, 15 aa, Severe acute respiratory syndrome coronavirus 2
  REGION 1..15: note = Spike Wuhan D614G; S_Wu_5_6; Table D
NFSQILPDPSKPSKR

SEQ ID NO: 27381 - protein, 15 aa, Severe acute respiratory syndrome coronavirus 2
  REGION 1..15: note = Spike Wuhan D614G; S_Wu_5_6; Table D
ILPDPSKPSKRSFIE

SEQ ID NO: 27382 - protein, 15 aa, Severe acute respiratory syndrome coronavirus 2
  REGION 1..15: note = Spike Wuhan D614G; S_Wu_5_6; Table D
PSKPSKRSFIEDLLF

SEQ ID NO: 27383 - protein, 15 aa, Severe acute respiratory syndrome coronavirus 2
  REGION 1..15: note = Spike Wuhan D614G; S_Wu_5_6; Table D
SKRSFIEDLLFNKVT

SEQ ID NO: 27384 - protein, 15 aa, Severe acute respiratory syndrome coronavirus 2
  REGION 1..15: note = Spike Wuhan D614G; S_Wu_5_6; Table D
FIEDLLFNKVTLADA

SEQ ID NO: 27385 - protein, 15 aa, Severe acute respiratory syndrome coronavirus 2
  REGION 1..15: note = Spike Wuhan D614G; S_Wu_5_6; Table D
LLFNKVTLADAGFIK

SEQ ID NO: 27386 - protein, 15 aa, Severe acute respiratory syndrome coronavirus 2
  REGION 1..15: note = Spike Wuhan D614G; S_Wu_5_6; Table D
KVTLADAGFIKQYGD

SEQ ID NO: 27387 - protein, 15 aa, Severe acute respiratory syndrome coronavirus 2
  REGION 1..15: note = Spike Wuhan D614G; S_Wu_5_6; Table D
ADAGFIKQYGDCLGD

SEQ ID NO: 27388 - protein, 15 aa, Severe acute respiratory syndrome coronavirus 2
  REGION 1..15: note = Spike Wuhan D614G; S_Wu_5_6; Table D
FIKQYGDCLGDIAAR

SEQ ID NO: 27389 - protein, 15 aa, Severe acute respiratory syndrome coronavirus 2
  REGION 1..15: note = Spike Wuhan D614G; S_Wu_5_6; Table D
YGDCLGDIAARDLIC

SEQ ID NO: 27390 - protein, 15 aa, Severe acute respiratory syndrome coronavirus 2
  REGION 1..15: note = Spike Wuhan D614G; S_Wu_5_6; Table D
LGDIAARDLICAQKF

SEQ ID NO: 27391 - protein, 15 aa, Severe acute respiratory syndrome coronavirus 2
  REGION 1..15: note = Spike Wuhan D614G; S_Wu_5_6; Table D
AARDLICAQKFNGLT

SEQ ID NO: 27392 - protein, 15 aa, Severe acute respiratory syndrome coronavirus 2
  REGION 1..15: note = Spike Wuhan D614G; S_Wu_5_6; Table D
LICAQKFNGLTVLPP

SEQ ID NO: 27393 - protein, 15 aa, Severe acute respiratory syndrome coronavirus 2
  REGION 1..15: note = Spike Wuhan D614G; S_Wu_5_6; Table D
QKFNGLTVLPPLLTD

SEQ ID NO: 27394 - protein, 15 aa, Severe acute respiratory syndrome coronavirus 2
  REGION 1..15: note = Spike Wuhan D614G; S_Wu_5_6; Table D
GLTVLPPLLTDEMIA

SEQ ID NO: 27395 - protein, 15 aa, Severe acute respiratory syndrome coronavirus 2
  REGION 1..15: note = Spike Wuhan D614G; S_Wu_5_6; Table D
LPPLLTDEMIAQYTS

SEQ ID NO: 27396 - protein, 15 aa, Severe acute respiratory syndrome coronavirus 2
  REGION 1..15: note = Spike Wuhan D614G; S_Wu_5_6; Table D
LTDEMIAQYTSALLA

SEQ ID NO: 27397 - protein, 15 aa, Severe acute respiratory syndrome coronavirus 2
  REGION 1..15: note = Spike Wuhan D614G; S_Wu_5_6; Table D
MIAQYTSALLAGTIT

SEQ ID NO: 27398 - protein, 15 aa, Severe acute respiratory syndrome coronavirus 2
  REGION 1..15: note = Spike Wuhan D614G; S_Wu_5_6; Table D
YTSALLAGTITSGWT

SEQ ID NO: 27399 - protein, 15 aa, Severe acute respiratory syndrome coronavirus 2
  REGION 1..15: note = Spike Wuhan D614G; S_Wu_5_6; Table D
LLAGTITSGWTFGAG

SEQ ID NO: 27400 - protein, 15 aa, Severe acute respiratory syndrome coronavirus 2
  REGION 1..15: note = Spike Wuhan D614G; S_Wu_5_6; Table D
TITSGWTFGAGAALQ

SEQ ID NO: 27401 - protein, 15 aa, Severe acute respiratory syndrome coronavirus 2
  REGION 1..15: note = Spike Wuhan D614G; S_Wu_5_6; Table D
GWTFGAGAALQIPFA

SEQ ID NO: 27402 - protein, 15 aa, Severe acute respiratory syndrome coronavirus 2
  REGION 1..15: note = Spike Wuhan D614G; S_Wu_5_6; Table D
GAGAALQIPFAMQMA

SEQ ID NO: 27403 - protein, 15 aa, Severe acute respiratory syndrome coronavirus 2
  REGION 1..15: note = Spike Wuhan D614G; S_Wu_5_6; Table D
ALQIPFAMQMAYRFN

SEQ ID NO: 27404 - protein, 15 aa, Severe acute respiratory syndrome coronavirus 2
  REGION 1..15: note = Spike Wuhan D614G; S_Wu_5_6; Table D
PFAMQMAYRFNGIGV

SEQ ID NO: 27405 - protein, 15 aa, Severe acute respiratory syndrome coronavirus 2
  REGION 1..15: note = Spike Wuhan D614G; S_Wu_5_6; Table D
QMAYRFNGIGVTQNV

SEQ ID NO: 27406 - protein, 15 aa, Severe acute respiratory syndrome coronavirus 2
  REGION 1..15: note = Spike Wuhan D614G; S_Wu_5_6; Table D
RFNGIGVTQNVLYEN

SEQ ID NO: 27407 - protein, 15 aa, Severe acute respiratory syndrome coronavirus 2
  REGION 1..15: note = Spike Wuhan D614G; S_Wu_5_6; Table D
IGVTQNVLYENQKLI

SEQ ID NO: 27408 - protein, 15 aa, Severe acute respiratory syndrome coronavirus 2
  REGION 1..15: note = Spike Wuhan D614G; S_Wu_5_6; Table D
QNVLYENQKLIANQF

SEQ ID NO: 27409 - protein, 15 aa, Severe acute respiratory syndrome coronavirus 2
  REGION 1..15: note = Spike Wuhan D614G; S_Wu_5_6; Table D
YENQKLIANQFNSAI

SEQ ID NO: 27410 - protein, 15 aa, Severe acute respiratory syndrome coronavirus 2
  REGION 1..15: note = Spike Wuhan D614G; S_Wu_5_6; Table D
KLIANQFNSAIGKIQ

SEQ ID NO: 27411 - protein, 15 aa, Severe acute respiratory syndrome coronavirus 2
  REGION 1..15: note = Spike Wuhan D614G; S_Wu_5_6; Table D
NQFNSAIGKIQDSLS

SEQ ID NO: 27412 - protein, 15 aa, Severe acute respiratory syndrome coronavirus 2
  REGION 1..15: note = Spike Wuhan D614G; S_Wu_5_6; Table D
SAIGKIQDSLSSTAS

SEQ ID NO: 27413 - protein, 15 aa, Severe acute respiratory syndrome coronavirus 2
  REGION 1..15: note = Spike Wuhan D614G; S_Wu_5_6; Table D
KIQDSLSSTASALGK

SEQ ID NO: 27414 - protein, 15 aa, Severe acute respiratory syndrome coronavirus 2
  REGION 1..15: note = Spike Wuhan D614G; S_Wu_5_6; Table D
SLSSTASALGKLQDV

SEQ ID NO: 27415 - protein, 15 aa, Severe acute respiratory syndrome coronavirus 2
  REGION 1..15: note = Spike Wuhan D614G; S_Wu_5_6; Table D
TASALGKLQDVVNQN

SEQ ID NO: 27416 - protein, 15 aa, Severe acute respiratory syndrome coronavirus 2
  REGION 1..15: note = Spike Wuhan D614G; S_Wu_5_6; Table D
LGKLQDVVNQNAQAL

SEQ ID NO: 27417 - protein, 15 aa, Severe acute respiratory syndrome coronavirus 2
  REGION 1..15: note = Spike Wuhan D614G; S_Wu_5_6; Table D
QDVVNQNAQALNTLV

SEQ ID NO: 27418 - protein, 15 aa, Severe acute respiratory syndrome coronavirus 2
  REGION 1..15: note = Spike Wuhan D614G; S_Wu_5_6; Table D
NQNAQALNTLVKQLS

SEQ ID NO: 27419 - protein, 15 aa, Severe acute respiratory syndrome coronavirus 2
  REGION 1..15: note = Spike Wuhan D614G; S_Wu_5_6; Table D
QALNTLVKQLSSNFG

SEQ ID NO: 27420 - protein, 15 aa, Severe acute respiratory syndrome coronavirus 2
  REGION 1..15: note = Spike Wuhan D614G; S_Wu_7_8; Table D
TLVKQLSSNFGAISS

SEQ ID NO: 27421 - protein, 15 aa, Severe acute respiratory syndrome coronavirus 2
  REGION 1..15: note = Spike Wuhan D614G; S_Wu_7_8; Table D
QLSSNFGAISSVLND

SEQ ID NO: 27422 - protein, 15 aa, Severe acute respiratory syndrome coronavirus 2
  REGION 1..15: note = Spike Wuhan D614G; S_Wu_7_8; Table D
NFGAISSVLNDILSR

SEQ ID NO: 27423 - protein, 15 aa, Severe acute respiratory syndrome coronavirus 2
  REGION 1..15: note = Spike Wuhan D614G; S_Wu_7_8; Table D
ISSVLNDILSRLDKV

SEQ ID NO: 27424 - protein, 15 aa, Severe acute respiratory syndrome coronavirus 2
  REGION 1..15: note = Spike Wuhan D614G; S_Wu_7_8; Table D
LNDILSRLDKVEAEV

SEQ ID NO: 27425 - protein, 15 aa, Severe acute respiratory syndrome coronavirus 2
  REGION 1..15: note = Spike Wuhan D614G; S_Wu_7_8; Table D
LSRLDKVEAEVQIDR

SEQ ID NO: 27426 - protein, 15 aa, Severe acute respiratory syndrome coronavirus 2
  REGION 1..15: note = Spike Wuhan D614G; S_Wu_7_8; Table D
DKVEAEVQIDRLITG

SEQ ID NO: 27427 - protein, 15 aa, Severe acute respiratory syndrome coronavirus 2
  REGION 1..15: note = Spike Wuhan D614G; S_Wu_7_8; Table D
AEVQIDRLITGRLQS

SEQ ID NO: 27428 - protein, 15 aa, Severe acute respiratory syndrome coronavirus 2
  REGION 1..15: note = Spike Wuhan D614G; S_Wu_7_8; Table D
IDRLITGRLQSLQTY

SEQ ID NO: 27429 - protein, 15 aa, Severe acute respiratory syndrome coronavirus 2
  REGION 1..15: note = Spike Wuhan D614G; S_Wu_7_8; Table D
ITGRLQSLQTYVTQQ

SEQ ID NO: 27430 - protein, 15 aa, Severe acute respiratory syndrome coronavirus 2
  REGION 1..15: note = Spike Wuhan D614G; S_Wu_7_8; Table D
LQSLQTYVTQQLIRA

SEQ ID NO: 27431 - protein, 15 aa, Severe acute respiratory syndrome coronavirus 2
  REGION 1..15: note = Spike Wuhan D614G; S_Wu_7_8; Table D
QTYVTQQLIRAAEIR

SEQ ID NO: 27432 - protein, 15 aa, Severe acute respiratory syndrome coronavirus 2
  REGION 1..15: note = Spike Wuhan D614G; S_Wu_7_8; Table D
TQQLIRAAEIRASAN

SEQ ID NO: 27433 - protein, 15 aa, Severe acute respiratory syndrome coronavirus 2
  REGION 1..15: note = Spike Wuhan D614G; S_Wu_7_8; Table D
IRAAEIRASANLAAT

SEQ ID NO: 27434 - protein, 15 aa, Severe acute respiratory syndrome coronavirus 2
  REGION 1..15: note = Spike Wuhan D614G; S_Wu_7_8; Table D
EIRASANLAATKMSE

SEQ ID NO: 27435 - protein, 15 aa, Severe acute respiratory syndrome coronavirus 2
  REGION 1..15: note = Spike Wuhan D614G; S_Wu_7_8; Table D
SANLAATKMSECVLG

SEQ ID NO: 27436 - protein, 15 aa, Severe acute respiratory syndrome coronavirus 2
  REGION 1..15: note = Spike Wuhan D614G; S_Wu_7_8; Table D
AATKMSECVLGQSKR

SEQ ID NO: 27437 - protein, 15 aa, Severe acute respiratory syndrome coronavirus 2
  REGION 1..15: note = Spike Wuhan D614G; S_Wu_7_8; Table D
MSECVLGQSKRVDFC

SEQ ID NO: 27438 - protein, 15 aa, Severe acute respiratory syndrome coronavirus 2
  REGION 1..15: note = Spike Wuhan D614G; S_Wu_7_8; Table D
VLGQSKRVDFCGKGY

SEQ ID NO: 27439 - protein, 15 aa, Severe acute respiratory syndrome coronavirus 2
  REGION 1..15: note = Spike Wuhan D614G; S_Wu_7_8; Table D
SKRVDFCGKGYHLMS

SEQ ID NO: 27440 - protein, 15 aa, Severe acute respiratory syndrome coronavirus 2
  REGION 1..15: note = Spike Wuhan D614G; S_Wu_7_8; Table D
DFCGKGYHLMSFPQS

SEQ ID NO: 27441 - protein, 15 aa, Severe acute respiratory syndrome coronavirus 2
  REGION 1..15: note = Spike Wuhan D614G; S_Wu_7_8; Table D
KGYHLMSFPQSAPHG

SEQ ID NO: 27442 - protein, 15 aa, Severe acute respiratory syndrome coronavirus 2
  REGION 1..15: note = Spike Wuhan D614G; S_Wu_7_8; Table D
LMSFPQSAPHGVVFL

SEQ ID NO: 27443 - protein, 15 aa, Severe acute respiratory syndrome coronavirus 2
  REGION 1..15: note = Spike Wuhan D614G; S_Wu_7_8; Table D
PQSAPHGVVFLHVTY

SEQ ID NO: 27444 - protein, 15 aa, Severe acute respiratory syndrome coronavirus 2
  REGION 1..15: note = Spike Wuhan D614G; S_Wu_7_8; Table D
PHGVVFLHVTYVPAQ

SEQ ID NO: 27445 - protein, 15 aa, Severe acute respiratory syndrome coronavirus 2
  REGION 1..15: note = Spike Wuhan D614G; S_Wu_7_8; Table D
VFLHVTYVPAQEKNF

SEQ ID NO: 27446 - protein, 15 aa, Severe acute respiratory syndrome coronavirus 2
  REGION 1..15: note = Spike Wuhan D614G; S_Wu_7_8; Table D
VTYVPAQEKNFTTAP

SEQ ID NO: 27447 - protein, 15 aa, Severe acute respiratory syndrome coronavirus 2
  REGION 1..15: note = Spike Wuhan D614G; S_Wu_7_8; Table D
PAQEKNFTTAPAICH

SEQ ID NO: 27448 - protein, 15 aa, Severe acute respiratory syndrome coronavirus 2
  REGION 1..15: note = Spike Wuhan D614G; S_Wu_7_8; Table D
KNFTTAPAICHDGKA

SEQ ID NO: 27449 - protein, 15 aa, Severe acute respiratory syndrome coronavirus 2
  REGION 1..15: note = Spike Wuhan D614G; S_Wu_7_8; Table D
TAPAICHDGKAHFPR

SEQ ID NO: 27450 - protein, 15 aa, Severe acute respiratory syndrome coronavirus 2
  REGION 1..15: note = Spike Wuhan D614G; S_Wu_7_8; Table D
ICHDGKAHFPREGVF

SEQ ID NO: 27451 - protein, 15 aa, Severe acute respiratory syndrome coronavirus 2
  REGION 1..15: note = Spike Wuhan D614G; S_Wu_7_8; Table D
GKAHFPREGVFVSNG

SEQ ID NO: 27452 - protein, 15 aa, Severe acute respiratory syndrome coronavirus 2
  REGION 1..15: note = Spike Wuhan D614G; S_Wu_7_8; Table D
FPREGVFVSNGTHWF

SEQ ID NO: 27453 - protein, 15 aa, Severe acute respiratory syndrome coronavirus 2
  REGION 1..15: note = Spike Wuhan D614G; S_Wu_7_8; Table D
GVFVSNGTHWFVTQR

SEQ ID NO: 27454 - protein, 15 aa, Severe acute respiratory syndrome coronavirus 2
  REGION 1..15: note = Spike Wuhan D614G; S_Wu_7_8; Table D
SNGTHWFVTQRNFYE

SEQ ID NO: 27455 - protein, 15 aa, Severe acute respiratory syndrome coronavirus 2
  REGION 1..15: note = Spike Wuhan D614G; S_Wu_7_8; Table D
HWFVTQRNFYEPQII

SEQ ID NO: 27456 - protein, 15 aa, Severe acute respiratory syndrome coronavirus 2
  REGION 1..15: note = Spike Wuhan D614G; S_Wu_7_8; Table D
TQRNFYEPQIITTDN

SEQ ID NO: 27457 - protein, 15 aa, Severe acute respiratory syndrome coronavirus 2
  REGION 1..15: note = Spike Wuhan D614G; S_Wu_7_8; Table D
FYEPQIITTDNTFVS

SEQ ID NO: 27458 - protein, 15 aa, Severe acute respiratory syndrome coronavirus 2
  REGION 1..15: note = Spike Wuhan D614G; S_Wu_7_8; Table D
QIITTDNTFVSGNCD

SEQ ID NO: 27459 - protein, 15 aa, Severe acute respiratory syndrome coronavirus 2
  REGION 1..15: note = Spike Wuhan D614G; S_Wu_7_8; Table D
TDNTFVSGNCDVVIG

SEQ ID NO: 27460 - protein, 15 aa, Severe acute respiratory syndrome coronavirus 2
  REGION 1..15: note = Spike Wuhan D614G; S_Wu_7_8; Table D
FVSGNCDVVIGIVNN

SEQ ID NO: 27461 - protein, 15 aa, Severe acute respiratory syndrome coronavirus 2
  REGION 1..15: note = Spike Wuhan D614G; S_Wu_7_8; Table D
NCDVVIGIVNNTVYD

SEQ ID NO: 27462 - protein, 15 aa, Severe acute respiratory syndrome coronavirus 2
  REGION 1..15: note = Spike Wuhan D614G; S_Wu_7_8; Table D
VIGIVNNTVYDPLQP

SEQ ID NO: 27463 - protein, 15 aa, Severe acute respiratory syndrome coronavirus 2
  REGION 1..15: note = Spike Wuhan D614G; S_Wu_7_8; Table D
VNNTVYDPLQPELDS

SEQ ID NO: 27464 - protein, 15 aa, Severe acute respiratory syndrome coronavirus 2
  REGION 1..15: note = Spike Wuhan D614G; S_Wu_7_8; Table D
VYDPLQPELDSFKEE

SEQ ID NO: 27465 - protein, 15 aa, Severe acute respiratory syndrome coronavirus 2
  REGION 1..15: note = Spike Wuhan D614G; S_Wu_7_8; Table D
LQPELDSFKEELDKY

SEQ ID NO: 27466 - protein, 15 aa, Severe acute respiratory syndrome coronavirus 2
  REGION 1..15: note = Spike Wuhan D614G; S_Wu_7_8; Table D
LDSFKEELDKYFKNH

SEQ ID NO: 27467 - protein, 15 aa, Severe acute respiratory syndrome coronavirus 2
  REGION 1..15: note = Spike Wuhan D614G; S_Wu_7_8; Table D
KEELDKYFKNHTSPD

SEQ ID NO: 27468 - protein, 15 aa, Severe acute respiratory syndrome coronavirus 2
  REGION 1..15: note = Spike Wuhan D614G; S_Wu_7_8; Table D
DKYFKNHTSPDVDLG

SEQ ID NO: 27469 - protein, 15 aa, Severe acute respiratory syndrome coronavirus 2
  REGION 1..15: note = Spike Wuhan D614G; S_Wu_7_8; Table D
KNHTSPDVDLGDISG

SEQ ID NO: 27470 - protein, 15 aa, Severe acute respiratory syndrome coronavirus 2
  REGION 1..15: note = Spike Wuhan D614G; S_Wu_7_8; Table D
SPDVDLGDISGINAS

SEQ ID NO: 27471 - protein, 15 aa, Severe acute respiratory syndrome coronavirus 2
  REGION 1..15: note = Spike Wuhan D614G; S_Wu_7_8; Table D
DLGDISGINASVVNI

SEQ ID NO: 27472 - protein, 15 aa, Severe acute respiratory syndrome coronavirus 2
  REGION 1..15: note = Spike Wuhan D614G; S_Wu_7_8; Table D
ISGINASVVNIQKEI

SEQ ID NO: 27473 - protein, 15 aa, Severe acute respiratory syndrome coronavirus 2
  REGION 1..15: note = Spike Wuhan D614G; S_Wu_7_8; Table D
NASVVNIQKEIDRLN

SEQ ID NO: 27474 - protein, 15 aa, Severe acute respiratory syndrome coronavirus 2
  REGION 1..15: note = Spike Wuhan D614G; S_Wu_7_8; Table D
VNIQKEIDRLNEVAK

SEQ ID NO: 27475 - protein, 15 aa, Severe acute respiratory syndrome coronavirus 2
  REGION 1..15: note = Spike Wuhan D614G; S_Wu_7_8; Table D
KEIDRLNEVAKNLNE

SEQ ID NO: 27476 - protein, 15 aa, Severe acute respiratory syndrome coronavirus 2
  REGION 1..15: note = Spike Wuhan D614G; S_Wu_7_8; Table D
RLNEVAKNLNESLID

SEQ ID NO: 27477 - protein, 15 aa, Severe acute respiratory syndrome coronavirus 2
  REGION 1..15: note = Spike Wuhan D614G; S_Wu_7_8; Table D
VAKNLNESLIDLQEL

SEQ ID NO: 27478 - protein, 15 aa, Severe acute respiratory syndrome coronavirus 2
  REGION 1..15: note = Spike Wuhan D614G; S_Wu_7_8; Table D
LNESLIDLQELGKYE

SEQ ID NO: 27479 - protein, 15 aa, Severe acute respiratory syndrome coronavirus 2
  REGION 1..15: note = Spike Wuhan D614G; S_Wu_7_8; Table D
LIDLQELGKYEQYIK

SEQ ID NO: 27480 - protein, 15 aa, Severe acute respiratory syndrome coronavirus 2
  REGION 1..15: note = Spike Wuhan D614G; S_Wu_7_8; Table D
QELGKYEQYIKWPWY

SEQ ID NO: 27481 - protein, 15 aa, Severe acute respiratory syndrome coronavirus 2
  REGION 1..15: note = Spike Wuhan D614G; S_Wu_7_8; Table D
KYEQYIKWPWYIWLG

SEQ ID NO: 27482 - protein, 15 aa, Severe acute respiratory syndrome coronavirus 2
  REGION 1..15: note = Spike Wuhan D614G; S_Wu_7_8; Table D
YIKWPWYIWLGFIAG

SEQ ID NO: 27483 - protein, 15 aa, Severe acute respiratory syndrome coronavirus 2
  REGION 1..15: note = Spike Wuhan D614G; S_Wu_7_8; Table D
PWYIWLGFIAGLIAI

SEQ ID NO: 27484 - protein, 15 aa, Severe acute respiratory syndrome coronavirus 2
  REGION 1..15: note = Spike Wuhan D614G; S_Wu_7_8; Table D
WLGFIAGLIAIVMVT

SEQ ID NO: 27485 - protein, 15 aa, Severe acute respiratory syndrome coronavirus 2
  REGION 1..15: note = Spike Wuhan D614G; S_Wu_7_8; Table D
IAGLIAIVMVTIMLC

SEQ ID NO: 27486 - protein, 15 aa, Severe acute respiratory syndrome coronavirus 2
  REGION 1..15: note = Spike Wuhan D614G; S_Wu_7_8; Table D
IAIVMVTIMLCCMTS

SEQ ID NO: 27487 - protein, 15 aa, Severe acute respiratory syndrome coronavirus 2
  REGION 1..15: note = Spike Wuhan D614G; S_Wu_7_8; Table D
MVTIMLCCMTSCCSC

SEQ ID NO: 27488 - protein, 15 aa, Severe acute respiratory syndrome coronavirus 2
  REGION 1..15: note = Spike Wuhan D614G; S_Wu_7_8; Table D
MLCCMTSCCSCLKGC

SEQ ID NO: 27489 - protein, 15 aa, Severe acute respiratory syndrome coronavirus 2
  REGION 1..15: note = Spike Wuhan D614G; S_Wu_7_8; Table D
MTSCCSCLKGCCSCG

SEQ ID NO: 27490 - protein, 15 aa, Severe acute respiratory syndrome coronavirus 2
  REGION 1..15: note = Spike Wuhan D614G; S_Wu_7_8; Table D
CSCLKGCCSCGSCCK

SEQ ID NO: 27491 - protein, 15 aa, Severe acute respiratory syndrome coronavirus 2
  REGION 1..15: note = Spike Wuhan D614G; S_Wu_7_8; Table D
KGCCSCGSCCKFDED

SEQ ID NO: 27492 - protein, 15 aa, Severe acute respiratory syndrome coronavirus 2
  REGION 1..15: note = Spike Wuhan D614G; S_Wu_7_8; Table D
SCGSCCKFDEDDSEP

SEQ ID NO: 27493 - protein, 15 aa, Severe acute respiratory syndrome coronavirus 2
  REGION 1..15: note = Spike Wuhan D614G; S_Wu_7_8; Table D
CCKFDEDDSEPVLKG

SEQ ID NO: 27494 - protein, 15 aa, Severe acute respiratory syndrome coronavirus 2
  REGION 1..15: note = Spike Wuhan D614G; S_Wu_7_8; Table D
DEDDSEPVLKGVKLH

SEQ ID NO: 27495 - protein, 13 aa, Severe acute respiratory syndrome coronavirus 2
  REGION 1..13: note = Spike Wuhan D614G; S_Wu_7_8; Table D
SEPVLKGVKLHYT

SEQ ID NO: 27496 - protein, 15 aa, Severe acute respiratory syndrome coronavirus 2
  REGION 1..15: note = Membrane; OLP_Mem; Table E
LLWPVTLACFVLAAV

SEQ ID NO: 27497 - protein, 15 aa, Severe acute respiratory syndrome coronavirus 2
  REGION 1..15: note = Membrane; OLP_Mem; Table E
VTLACFVLAAVYRIN

SEQ ID NO: 27498 - protein, 12 aa, Severe acute respiratory syndrome coronavirus 2
  REGION 1..12: note = Membrane; OLP_Mem; Table E
CFVLAAVYRINW

SEQ ID NO: 27499 - protein, 15 aa, Severe acute respiratory syndrome coronavirus 2
  REGION 1..15: note = Membrane; OLP_Mem; Table E
MACLVGLMWLSYFIA

SEQ ID NO: 27500 - protein, 15 aa, Severe acute respiratory syndrome coronavirus 2
  REGION 1..15: note = Membrane; OLP_Mem; Table E
VGLMWLSYFIASFRL

SEQ ID NO: 27501 - protein, 15 aa, Severe acute respiratory syndrome coronavirus 2
  REGION 1..15: note = Nucleocapsid; OLP_Nuc; Table E
RRPQGLPNNTASWFT

SEQ ID NO: 27502 - protein, 15 aa, Severe acute respiratory syndrome coronavirus 2
  REGION 1..15: note = Nucleocapsid; OLP_Nuc; Table E
GLPNNTASWFTALTQ

SEQ ID NO: 27503 - protein, 15 aa, Severe acute respiratory syndrome coronavirus 2
  REGION 1..15: note = Nucleocapsid; OLP_Nuc; Table E
NTASWFTALTQHGKE

SEQ ID NO: 27504 - protein, 15 aa, Severe acute respiratory syndrome coronavirus 2
  REGION 1..15: note = Nucleocapsid; OLP_Nuc; Table E
WFTALTQHGKEDLKF

SEQ ID NO: 27505 - protein, 15 aa, Severe acute respiratory syndrome coronavirus 2
  REGION 1..15: note = Nucleocapsid; OLP_Nuc; Table E
LTQHGKEDLKFPRGQ

SEQ ID NO: 27506 - protein, 15 aa, Severe acute respiratory syndrome coronavirus 2
  REGION 1..15: note = Nucleocapsid; OLP_Nuc; Table E
GKEDLKFPRGQGVPI

SEQ ID NO: 27507 - protein, 15 aa, Severe acute respiratory syndrome coronavirus 2
  REGION 1..15: note = Nucleocapsid; OLP_Nuc; Table E
LKFPRGQGVPINTNS

SEQ ID NO: 27508 - protein, 15 aa, Severe acute respiratory syndrome coronavirus 2
  REGION 1..15: note = Nucleocapsid; OLP_Nuc; Table E
RGQGVPINTNSSPDD

SEQ ID NO: 27509 - protein, 15 aa, Severe acute respiratory syndrome coronavirus 2
  REGION 1..15: note = Nucleocapsid; OLP_Nuc; Table E
VPINTNSSPDDQIGY

SEQ ID NO: 27510 - protein, 15 aa, Severe acute respiratory syndrome coronavirus 2
  REGION 1..15: note = Nucleocapsid; OLP_Nuc; Table E
TNSSPDDQIGYYRRA

SEQ ID NO: 27511 - protein, 15 aa, Severe acute respiratory syndrome coronavirus 2
  REGION 1..15: note = Nucleocapsid; OLP_Nuc; Table E
PDDQIGYYRRATRRI

SEQ ID NO: 27512 - protein, 15 aa, Severe acute respiratory syndrome coronavirus 2
  REGION 1..15: note = Nucleocapsid; OLP_Nuc; Table E
KMKDLSPRWYFYYLG

SEQ ID NO: 27513 - protein, 15 aa, Severe acute respiratory syndrome coronavirus 2
  REGION 1..15: note = Nucleocapsid; OLP_Nuc; Table E
LSPRWYFYYLGTGPE

SEQ ID NO: 27514 - protein, 15 aa, Severe acute respiratory syndrome coronavirus 2
  REGION 1..15: note = Nucleocapsid; OLP_Nuc; Table E
GIIWVATEGALNTPK

SEQ ID NO: 27515 - protein, 15 aa, Severe acute respiratory syndrome coronavirus 2
  REGION 1..15: note = Nucleocapsid; OLP_Nuc; Table E
VATEGALNTPKDHIG

SEQ ID NO: 27516 - protein, 15 aa, Severe acute respiratory syndrome coronavirus 2
  REGION 1..15: note = Nucleocapsid; OLP_Nuc; Table E
GALNTPKDHIGTRNP

SEQ ID NO: 27517 - protein, 15 aa, Severe acute respiratory syndrome coronavirus 2
  REGION 1..15: note = Nucleocapsid; OLP_Nuc; Table E
TPKDHIGTRNPANNA

SEQ ID NO: 27518 - protein, 15 aa, Severe acute respiratory syndrome coronavirus 2
  REGION 1..15: note = Nucleocapsid; OLP_Nuc; Table E
HIGTRNPANNAAIVL

SEQ ID NO: 27519 - protein, 15 aa, Severe acute respiratory syndrome coronavirus 2
  REGION 1..15: note = Nucleocapsid; OLP_Nuc; Table E
RNPANNAAIVLQLPQ

SEQ ID NO: 27520 - protein, 15 aa, Severe acute respiratory syndrome coronavirus 2
  REGION 1..15: note = Nucleocapsid; OLP_Nuc; Table E
NNAAIVLQLPQGTTL

SEQ ID NO: 27521 - protein, 15 aa, Severe acute respiratory syndrome coronavirus 2
  REGION 1..15: note = Nucleocapsid; OLP_Nuc; Table E
IVLQLPQGTTLPKGF

SEQ ID NO: 27522 - protein, 14 aa, Severe acute respiratory syndrome coronavirus 2
  REGION 1..14: note = Nucleocapsid; OLP_Nuc; Table E
LPQGTTLPKGFYAE

SEQ ID NO: 27523 - protein, 15 aa, Severe acute respiratory syndrome coronavirus 2
  REGION 1..15: note = Nucleocapsid; OLP_Nuc; Table E
TSPARMAGNGGDAAL

SEQ ID NO: 27524 - protein, 15 aa, Severe acute respiratory syndrome coronavirus 2
  REGION 1..15: note = Nucleocapsid; OLP_Nuc; Table E
RMAGNGGDAALALLL

SEQ ID NO: 27525 - protein, 15 aa, Severe acute respiratory syndrome coronavirus 2
  REGION 1..15: note = Nucleocapsid; OLP_Nuc; Table E
NGGDAALALLLLDRL

SEQ ID NO: 27526 - protein, 15 aa, Severe acute respiratory syndrome coronavirus 2
  REGION 1..15: note = Nucleocapsid; OLP_Nuc; Table E
AALALLLLDRLNQLE

SEQ ID NO: 27527 - protein, 15 aa, Severe acute respiratory syndrome coronavirus 2
  REGION 1..15: note = Nucleocapsid; OLP_Nuc; Table E
LLLLDRLNQLESKMS

SEQ ID NO: 27528 - protein, 15 aa, Severe acute respiratory syndrome coronavirus 2
  REGION 1..15: note = Nucleocapsid; OLP_Nuc; Table E
DRLNQLESKMSGKGQ

SEQ ID NO: 27529 - protein, 15 aa, Severe acute respiratory syndrome coronavirus 2
  REGION 1..15: note = Nucleocapsid; OLP_Nuc; Table E
KMSGKGQQQQGQTVT

SEQ ID NO: 27530 - protein, 15 aa, Severe acute respiratory syndrome coronavirus 2
  REGION 1..15: note = Nucleocapsid; OLP_Nuc; Table E
KGQQQQGQTVTKKSA

SEQ ID NO: 27531 - protein, 15 aa, Severe acute respiratory syndrome coronavirus 2
  REGION 1..15: note = Nucleocapsid; OLP_Nuc; Table E
QQGQTVTKKSAAEAS

SEQ ID NO: 27532 - protein, 15 aa, Severe acute respiratory syndrome coronavirus 2
  REGION 1..15: note = Nucleocapsid; OLP_Nuc; Table E
TVTKKSAAEASKKPR

SEQ ID NO: 27533 - protein, 15 aa, Severe acute respiratory syndrome coronavirus 2
  REGION 1..15: note = Nucleocapsid; OLP_Nuc; Table E
KSAAEASKKPRQKRT

SEQ ID NO: 27534 - protein, 15 aa, Severe acute respiratory syndrome coronavirus 2
  REGION 1..15: note = Nucleocapsid; OLP_Nuc; Table E
EASKKPRQKRTATKA

SEQ ID NO: 27535 - protein, 15 aa, Severe acute respiratory syndrome coronavirus 2
  REGION 1..15: note = Nucleocapsid; OLP_Nuc; Table E
KPRQKRTATKAYNVT

SEQ ID NO: 27536 - protein, 15 aa, Severe acute respiratory syndrome coronavirus 2
  REGION 1..15: note = Nucleocapsid; OLP_Nuc; Table E
KRTATKAYNVTQAFG

SEQ ID NO: 27537 - protein, 15 aa, Severe acute respiratory syndrome coronavirus 2
  REGION 1..15: note = Nucleocapsid; OLP_Nuc; Table E
TKAYNVTQAFGRRGP

SEQ ID NO: 27538 - protein, 14 aa, Severe acute respiratory syndrome coronavirus 2
  REGION 1..14: note = Nucleocapsid; OLP_Nuc; Table E
NVTQAFGRRGPEQT

SEQ ID NO: 27539 - protein, 15 aa, Severe acute respiratory syndrome coronavirus 2
  REGION 1..15: note = Nucleocapsid; OLP_Nuc; Table E
GNFGDQELIRQGTDY

SEQ ID NO: 27540 - protein, 15 aa, Severe acute respiratory syndrome coronavirus 2
  REGION 1..15: note = Nucleocapsid; OLP_Nuc; Table E
DQELIRQGTDYKHWP

SEQ ID NO: 27541 - protein, 15 aa, Severe acute respiratory syndrome coronavirus 2
  REGION 1..15: note = Nucleocapsid; OLP_Nuc; Table E
IRQGTDYKHWPQIAQ

SEQ ID NO: 27542 - protein, 15 aa, Severe acute respiratory syndrome coronavirus 2
  REGION 1..15: note = Nucleocapsid; OLP_Nuc; Table E
TDYKHWPQIAQFAPS

SEQ ID NO: 27543 - protein, 15 aa, Severe acute respiratory syndrome coronavirus 2
  REGION 1..15: note = Nucleocapsid; OLP_Nuc; Table E
HWPQIAQFAPSASAF

SEQ ID NO: 27544 - protein, 15 aa, Severe acute respiratory syndrome coronavirus 2
  REGION 1..15: note = Nucleocapsid; OLP_Nuc; Table E
IAQFAPSASAFFGMS

SEQ ID NO: 27545 - protein, 15 aa, Severe acute respiratory syndrome coronavirus 2
  REGION 1..15: note = Nucleocapsid; OLP_Nuc; Table E
APSASAFFGMSRIGM

SEQ ID NO: 27546 - protein, 15 aa, Severe acute respiratory syndrome coronavirus 2
  REGION 1..15: note = Nucleocapsid; OLP_Nuc; Table E
SAFFGMSRIGMEVTP

SEQ ID NO: 27547 - protein, 15 aa, Severe acute respiratory syndrome coronavirus 2
  REGION 1..15: note = Nucleocapsid; OLP_Nuc; Table E
GMSRIGMEVTPSGTW

SEQ ID NO: 27548 - protein, 15 aa, Severe acute respiratory syndrome coronavirus 2
  REGION 1..15: note = Nucleocapsid; OLP_Nuc; Table E
IGMEVTPSGTWLTYT

SEQ ID NO: 27549 - protein, 15 aa, Severe acute respiratory syndrome coronavirus 2
  REGION 1..15: note = Nucleocapsid; OLP_Nuc; Table E
VTPSGTWLTYTGAIK

SEQ ID NO: 27550 - protein, 15 aa, Severe acute respiratory syndrome coronavirus 2
  REGION 1..15: note = Nucleocapsid; OLP_Nuc; Table E
FKDQVILLNKHIDAY

SEQ ID NO: 27551 - protein, 15 aa, Severe acute respiratory syndrome coronavirus 2
  REGION 1..15: note = Nucleocapsid; OLP_Nuc; Table E
VILLNKHIDAYKTFP

SEQ ID NO: 27552 - protein, 15 aa, Severe acute respiratory syndrome coronavirus 2
  REGION 1..15: note = Nucleocapsid; OLP_Nuc; Table E
NKHIDAYKTFPPTEP

SEQ ID NO: 27553 - protein, 15 aa, Severe acute respiratory syndrome coronavirus 2
  REGION 1..15: note = Nucleocapsid; OLP_Nuc; Table E
DAYKTFPPTEPKKDK

SEQ ID NO: 27554 - protein, 14 aa, Severe acute respiratory syndrome coronavirus 2
  REGION 1..14: note = Nucleocapsid; OLP_Nuc; Table E
TFPPTEPKKDKKKK

SEQ ID NO: 27555 - protein, 15 aa, Severe acute respiratory syndrome coronavirus 2
  REGION 1..15: note = Nucleocapsid; OLP_Nuc; Table E
KKDKKKKADETQALP

SEQ ID NO: 27556 - protein, 15 aa, Severe acute respiratory syndrome coronavirus 2
  REGION 1..15: note = Nucleocapsid; OLP_Nuc; Table E
KKKADETQALPQRQK

SEQ ID NO: 27557 - protein, 15 aa, Severe acute respiratory syndrome coronavirus 2
  REGION 1..15: note = Nucleocapsid; OLP_Nuc; Table E
DETQALPQRQKKQQT

SEQ ID NO: 27558 - protein, 15 aa, Severe acute respiratory syndrome coronavirus 2
  REGION 1..15: note = Nucleocapsid; OLP_Nuc; Table E
ALPQRQKKQQTVTLL

SEQ ID NO: 27559 - protein, 15 aa, Severe acute respiratory syndrome coronavirus 2
  REGION 1..15: note = Nucleocapsid; OLP_Nuc; Table E
RQKKQQTVTLLPAAD

SEQ ID NO: 27560 - protein, 15 aa, Severe acute respiratory syndrome coronavirus 2
  REGION 1..15: note = Nucleocapsid; OLP_Nuc; Table E
QQTVTLLPAADLDDF

SEQ ID NO: 27561 - protein, 15 aa, Severe acute respiratory syndrome coronavirus 2
  REGION 1..15: note = Nucleocapsid; OLP_Nuc; Table E
TLLPAADLDDFSKQL

SEQ ID NO: 27562 - protein, 12 aa, Severe acute respiratory syndrome coronavirus 2
  REGION 1..12: note = Nucleocapsid; OLP_Nuc; Table E
AADLDDFSKQLQ

SEQ ID NO: 27563 - protein, 15 aa, Severe acute respiratory syndrome coronavirus 2
  REGION 1..15: note = ORF3a; OLP_ORF3a; Table E
VTLKQGEIKDATPSD

SEQ ID NO: 27564 - protein, 15 aa, Severe acute respiratory syndrome coronavirus 2
  REGION 1..15: note = ORF3a; OLP_ORF3a; Table E
QGEIKDATPSDFVRA

SEQ ID NO: 27565 - protein, 15 aa, Severe acute respiratory syndrome coronavirus 2
  REGION 1..15: note = ORF3a; OLP_ORF3a; Table E
KDATPSDFVRATATI

SEQ ID NO: 27566 - protein, 15 aa, Severe acute respiratory syndrome coronavirus 2
  REGION 1..15: note = ORF3a; OLP_ORF3a; Table E
PSDFVRATATIPIQA

SEQ ID NO: 27567 - protein, 15 aa, Severe acute respiratory syndrome coronavirus 2
  REGION 1..15: note = ORF3a; OLP_ORF3a; Table E
VRATATIPIQASLPF

SEQ ID NO: 27568 - protein, 15 aa, Severe acute respiratory syndrome coronavirus 2
  REGION 1..15: note = ORF3a; OLP_ORF3a; Table E
ATIPIQASLPFGWLI

SEQ ID NO: 27569 - protein, 15 aa, Severe acute respiratory syndrome coronavirus 2
  REGION 1..15: note = ORF3a; OLP_ORF3a; Table E
IQASLPFGWLIVGVA

SEQ ID NO: 27570 - protein, 15 aa, Severe acute respiratory syndrome coronavirus 2
  REGION 1..15: note = ORF3a; OLP_ORF3a; Table E
LPFGWLIVGVALLAV

SEQ ID NO: 27571 - protein, 15 aa, Severe acute respiratory syndrome coronavirus 2
  REGION 1..15: note = ORF3a; OLP_ORF3a; Table E
LAVFQSASKIITLKK

SEQ ID NO: 27572 - protein, 15 aa, Severe acute respiratory syndrome coronavirus 2
  REGION 1..15: note = ORF3a; OLP_ORF3a; Table E
QSASKIITLKKRWQL

SEQ ID NO: 27573 - protein, 15 aa, Severe acute respiratory syndrome coronavirus 2
  REGION 1..15: note = ORF3a; OLP_ORF3a; Table E
KIITLKKRWQLALSK

SEQ ID NO: 27574 - protein, 15 aa, Severe acute respiratory syndrome coronavirus 2
  REGION 1..15: note = ORF3a; OLP_ORF3a; Table E
LKKRWQLALSKGVHF

SEQ ID NO: 27575 - protein, 15 aa, Severe acute respiratory syndrome coronavirus 2
  REGION 1..15: note = ORF3a; OLP_ORF3a; Table E
WQLALSKGVHFVCNL

SEQ ID NO: 27576 - protein, 13 aa, Severe acute respiratory syndrome coronavirus 2
  REGION 1..13: note = ORF3a; OLP_ORF3a; Table E
LSKGVHFVCNLLL

SEQ ID NO: 27577 - protein, 15 aa, Severe acute respiratory syndrome coronavirus 2
  REGION 1..15: note = ORF3a; OLP_ORF3a; Table E
EAPFLYLYALVYFLQ

SEQ ID NO: 27578 - protein, 15 aa, Severe acute respiratory syndrome coronavirus 2
  REGION 1..15: note = ORF3a; OLP_ORF3a; Table E
LYLYALVYFLQSINF

SEQ ID NO: 27579 - protein, 15 aa, Severe acute respiratory syndrome coronavirus 2
  REGION 1..15: note = ORF3a; OLP_ORF3a; Table E
ALVYFLQSINFVRII

SEQ ID NO: 27580 - protein, 15 aa, Severe acute respiratory syndrome coronavirus 2
  REGION 1..15: note = ORF3a; OLP_ORF3a; Table E
FLQSINFVRIIMRLW

SEQ ID NO: 27581 - protein, 15 aa, Severe acute respiratory syndrome coronavirus 2
  REGION 1..15: note = ORF3a; OLP_ORF3a; Table E
INFVRIIMRLWLCWK

SEQ ID NO: 27582 - protein, 15 aa, Severe acute respiratory syndrome coronavirus 2
  REGION 1..15: note = ORF3a; OLP_ORF3a; Table E
RIIMRLWLCWKCRSK

SEQ ID NO: 27583 - protein, 15 aa, Severe acute respiratory syndrome coronavirus 2
  REGION 1..15: note = ORF3a; OLP_ORF3a; Table E
RLWLCWKCRSKNPLL

SEQ ID NO: 27584 - protein, 15 aa, Severe acute respiratory syndrome coronavirus 2
  REGION 1..15: note = ORF3a; OLP_ORF3a; Table E
CWKCRSKNPLLYDAN

SEQ ID NO: 27585 - protein, 15 aa, Severe acute respiratory syndrome coronavirus 2
  REGION 1..15: note = ORF3a; OLP_ORF3a; Table E
RSKNPLLYDANYFLC

SEQ ID NO: 27586 - protein, 15 aa, Severe acute respiratory syndrome coronavirus 2
  REGION 1..15: note = ORF3a; OLP_ORF3a; Table E
PLLYDANYFLCWHTN

SEQ ID NO: 27587 - protein, 15 aa, Severe acute respiratory syndrome coronavirus 2
  REGION 1..15: note = ORF3a; OLP_ORF3a; Table E
ITSGDGTTSPISEHD

SEQ ID NO: 27588 - protein, 15 aa, Severe acute respiratory syndrome coronavirus 2
  REGION 1..15: note = ORF3a; OLP_ORF3a; Table E
DGTTSPISEHDYQIG

SEQ ID NO: 27589 - protein, 15 aa, Severe acute respiratory syndrome coronavirus 2
  REGION 1..15: note = ORF3a; OLP_ORF3a; Table E
SPISEHDYQIGGYTE

SEQ ID NO: 27590 - protein, 15 aa, Severe acute respiratory syndrome coronavirus 2
  REGION 1..15: note = ORF3a; OLP_ORF3a; Table E
EHDYQIGGYTEKWES

SEQ ID NO: 27591 - protein, 14 aa, Severe acute respiratory syndrome coronavirus 2
  REGION 1..14: note = ORF3a; OLP_ORF3a; Table E
QIGGYTEKWESGVK

SEQ ID NO: 27592 - protein, 15 aa, Severe acute respiratory syndrome coronavirus 2
  REGION 1..15: note = ORF3a; OLP_ORF3a; Table E
DCVVLHSYFTSDYYQ

SEQ ID NO: 27593 - protein, 15 aa, Severe acute respiratory syndrome coronavirus 2
  REGION 1..15: note = ORF3a; OLP_ORF3a; Table E
LHSYFTSDYYQLYST

SEQ ID NO: 27594 - protein, 15 aa, Severe acute respiratory syndrome coronavirus 2
  REGION 1..15: note = ORF3a; OLP_ORF3a; Table E
FTSDYYQLYSTQLST

SEQ ID NO: 27595 - protein, 15 aa, Severe acute respiratory syndrome coronavirus 2
  REGION 1..15: note = ORF3a; OLP_ORF3a; Table E
YYQLYSTQLSTDTGV

SEQ ID NO: 27596 - protein, 15 aa, Severe acute respiratory syndrome coronavirus 2
  REGION 1..15: note = ORF3a; OLP_ORF3a; Table E
YSTQLSTDTGVEHVT

SEQ ID NO: 27597 - protein, 15 aa, Severe acute respiratory syndrome coronavirus 2
  REGION 1..15: note = ORF3a; OLP_ORF3a; Table E
LSTDTGVEHVTFFIY

SEQ ID NO: 27598 - protein, 15 aa, Severe acute respiratory syndrome coronavirus 2
  REGION 1..15: note = ORF3a; OLP_ORF3a; Table E
TGVEHVTFFIYNKIV

SEQ ID NO: 27599 - protein, 15 aa, Severe acute respiratory syndrome coronavirus 2
  REGION 1..15: note = ORF3a; OLP_ORF3a; Table E
HVTFFIYNKIVDEPE

SEQ ID NO: 27600 - protein, 15 aa, Severe acute respiratory syndrome coronavirus 2
  REGION 1..15: note = ORF3a; OLP_ORF3a; Table E
FIYNKIVDEPEEHVQ

SEQ ID NO: 27601 - protein, 15 aa, Severe acute respiratory syndrome coronavirus 2
  REGION 1..15: note = ORF3a; OLP_ORF3a; Table E
KIVDEPEEHVQIHTI

SEQ ID NO: 27602 - protein, 15 aa, Severe acute respiratory syndrome coronavirus 2
  REGION 1..15: note = ORF3a; OLP_ORF3a; Table E
EPEEHVQIHTIDGSS

SEQ ID NO: 27603 - protein, 12 aa, Severe acute respiratory syndrome coronavirus 2
  REGION 1..12: note = ORF3a; OLP_ORF3a; Table E
HVQIHTIDGSSG

SEQ ID NO: 27604 - protein, 9 aa, Severe acute respiratory syndrome coronavirus 2
  REGION 1..9: note = ORF3a 52-85; Min_validated; Table F
ALSKGVHFV

SEQ ID NO: 27605 - protein, 9 aa, Severe acute respiratory syndrome coronavirus 2
  REGION 1..9: note = N 204-239; Min_validated; Table F
LLLDRLNQL

SEQ ID NO: 27606 - protein, 9 aa, Severe acute respiratory syndrome coronavirus 2
  REGION 1..9: note = ORF3a 52-85; Min_validated; Table F
SASKIITLK

SEQ ID NO: 27607 - protein, 9 aa, Severe acute respiratory syndrome coronavirus 2
  REGION 1..9: note = N 345-375; Min_validated; Table F
KTFPPTEPK

SEQ ID NO: 27608 - protein, 10 aa, Severe acute respiratory syndrome coronavirus 2
  REGION 1..10: note = N 283-338; Min_validated; Table F
AQFAPSASAF

SEQ ID NO: 27609 - protein, 9 aa, Severe acute respiratory syndrome coronavirus 2
  REGION 1..9: note = ORF3a 198-254; Min_validated; Table F
YYQLYSTQL

SEQ ID NO: 27610 - protein, 10 aa, Severe acute respiratory syndrome coronavirus 2
  REGION 1..10: note = N 128-174; Min_validated; Table F
ATEGALNTPK

SEQ ID NO: 27611 - protein, 9 aa, Severe acute respiratory syndrome coronavirus 2
  REGION 1..9: note = ORF3a 101-152; Min_validated; Table F
VYFLQSINF

SEQ ID NO: 27612 - protein, 9 aa, Severe acute respiratory syndrome coronavirus 2
  REGION 1..9: note = N 283-338; Min_validated; Table F
GMSRIGMEV

SEQ ID NO: 27613 - protein, 10 aa, Severe acute respiratory syndrome coronavirus 2
  REGION 1..10: note = N 345-375; Min_validated; Table F
KTFPPTEPKK

SEQ ID NO: 27614 - protein, 9 aa, Severe acute respiratory syndrome coronavirus 2
  REGION 1..9: note = ORF3a 198-254; Min_validated; Table F
FTSDYYQLY

SEQ ID NO: 27615 - protein, 9 aa, Severe acute respiratory syndrome coronavirus 2
  REGION 1..9: note = N 283-338; Min_validated; Table F
ASAFFGMSR

SEQ ID NO: 27616 - protein, 9 aa, Severe acute respiratory syndrome coronavirus 2
  REGION 1..9: note = N 99-118; Min_validated; Table F
SPRWYFYYL

SEQ ID NO: 27617 - protein, 9 aa, Severe acute respiratory syndrome coronavirus 2
  REGION 1..9: note = ORF3a 101-152; Min_validated; Table F
YLYALVYFL

SEQ ID NO: 27618 - protein, 9 aa, Severe acute respiratory syndrome coronavirus 2
  REGION 1..9: note = N 283-338; Min_validated; Table F
MEVTPSGTW

SEQ ID NO: 27619 - protein, 9 aa, Severe acute respiratory syndrome coronavirus 2
  REGION 1..9: note = ORF3a 101-152; Min_validated; Table F
LLYDANYFL

SEQ ID NO: 27620 - protein, 10 aa, Severe acute respiratory syndrome coronavirus 2
  REGION 1..10: note = N 204-239; Min_validated; Table F
LLLLDRLNQL

SEQ ID NO: 27621 - protein, 10 aa, Severe acute respiratory syndrome coronavirus 2
  REGION 1..10: note = N 128-174; Min_validated; Table F
NPANNAAIVL

SEQ ID NO: 27622 - protein, 9 aa, Severe acute respiratory syndrome coronavirus 2
  REGION 1..9: note = N 128-174; Min_validated; Table F
LQLPQGTTL

SEQ ID NO: 27623 - protein, 9 aa, Severe acute respiratory syndrome coronavirus 2
  REGION 1..9: note = N 39-94; Min_validated; Table F
FPRGQGVPI

SEQ ID NO: 27624 - protein, 10 aa, Severe acute respiratory syndrome coronavirus 2
  REGION 1..10: note = N 283-338; Min_validated; Table F
MEVTPSGTWL

SEQ ID NO: 27625 - protein, 9 aa, Severe acute respiratory syndrome coronavirus 2
  REGION 1..9: note = N 204-239; Min_validated; Table F
LALLLLDRL

SEQ ID NO: 27626 - protein, 9 aa, Severe acute respiratory syndrome coronavirus 2
  REGION 1..9: note = N 232-282; Min_validated; Table F
KPRQKRTAT

SEQ ID NO: 27627 - protein, 9 aa, Severe acute respiratory syndrome coronavirus 2
  REGION 1..9: note = N 128-174; Min_validated; Table F
ALNTPKDHI

SEQ ID NO: 27628 - protein, 11 aa, Severe acute respiratory syndrome coronavirus 2
  REGION 1..11: note = N 283-338; Min_validated; Table F
DYKHWPQIAQF

SEQ ID NO: 27629 - protein, 9 aa, Severe acute respiratory syndrome coronavirus 2
  REGION 1..9: note = M 83-102; Min_validated; Table F
GLMWLSYFI

SEQ ID NO: 27630 - protein, 10 aa, Severe acute respiratory syndrome coronavirus 2
  REGION 1..10: note = M 55-75; Min_validated; Table F
TLACFVLAAV

SEQ ID NO: 27631 - protein, 9 aa, Severe acute respiratory syndrome coronavirus 2
  REGION 1..9: note = N 232-282; Min_EDGE_Nuc; Table F
KAYNVTQAF

SEQ ID NO: 27632 - protein, 9 aa, Severe acute respiratory syndrome coronavirus 2
  REGION 1..9: note = N 232-282; Min_EDGE_Nuc; Table F
GQQQQGQTV

SEQ ID NO: 27633 - protein, 9 aa, Severe acute respiratory syndrome coronavirus 2
  REGION 1..9: note = N 368-408; Min_EDGE_Nuc; Table F
LPAADLDDF

SEQ ID NO: 27634 - protein, 9 aa, Severe acute respiratory syndrome coronavirus 2
  REGION 1..9: note = N 283-338; Min_EDGE_Nuc; Table F
ELIRQGTDY

SEQ ID NO: 27635 - protein, 9 aa, Severe acute respiratory syndrome coronavirus 2
  REGION 1..9: note = N 283-338; Min_EDGE_Nuc; Table F
QFAPSASAF

SEQ ID NO: 27636 - protein, 11 aa, Severe acute respiratory syndrome coronavirus 2
  REGION 1..11: note = N 232-282; Min_EDGE_Nuc; Table F
GQQQQGQTVTK

SEQ ID NO: 27637 - protein, 9 aa, Severe acute respiratory syndrome coronavirus 2
  REGION 1..9: note = N 283-338; Min_EDGE_Nuc; Table F
TPSGTWLTY

SEQ ID NO: 27638 - protein, 9 aa, Severe acute respiratory syndrome coronavirus 2
  REGION 1..9: note = N 283-338; Min_EDGE_Nuc; Table F
KHWPQIAQF

SEQ ID NO: 27639 - protein, 8 aa, Severe acute respiratory syndrome coronavirus 2
  REGION 1..8: note = N 232-282; Min_EDGE_Nuc; Table F
AYNVTQAF

SEQ ID NO: 27640 - protein, 10 aa, Severe acute respiratory syndrome coronavirus 2
  REGION 1..10: note = N 368-408; Min_EDGE_Nuc; Table F
ETQALPQRQK

SEQ ID NO: 27641 - protein, 11 aa, Severe acute respiratory syndrome coronavirus 2
  REGION 1..11: note = N 232-282; Min_EDGE_Nuc; Table F
KAYNVTQAFGR

SEQ ID NO: 27642 - protein, 9 aa, Severe acute respiratory syndrome coronavirus 2
  REGION 1..9: note = N 128-174; Min_EDGE_Nuc; Table F
TPKDHIGTR

SEQ ID NO: 27643 - protein, 9 aa, Severe acute respiratory syndrome coronavirus 2
  REGION 1..9: note = N 39-94; Min_EDGE_Nuc; Table F
QHGKEDLKF

SEQ ID NO: 27644 - protein, 10 aa, Severe acute respiratory syndrome coronavirus 2
  REGION 1..10: note = N 39-94; Min_EDGE_Nuc; Table F
TQHGKEDLKF

SEQ ID NO: 27645 - protein, 9 aa, Severe acute respiratory syndrome coronavirus 2
  REGION 1..9: note = N 232-282; Min_EDGE_Nuc; Table F
NVTQAFGRR

SEQ ID NO: 27646 - protein, 11 aa, Severe acute respiratory syndrome coronavirus 2
  REGION 1..11: note = N 283-338; Min_EDGE_Nuc; Table F
AQFAPSASAFF

SEQ ID NO: 27647 - protein, 9 aa, Severe acute respiratory syndrome coronavirus 2
  REGION 1..9: note = N 204-239; Min_EDGE_Nuc; Table F
RLNQLESKM

SEQ ID NO: 27648 - protein, 9 aa, Severe acute respiratory syndrome coronavirus 2
  REGION 1..9: note = N 39-94; Min_EDGE_Nuc; Table F
SPDDQIGYY

SEQ ID NO: 27649 - protein, 8 aa, Severe acute respiratory syndrome coronavirus 2
  REGION 1..8: note = N 283-338; Min_EDGE_Nuc; Table F
EVTPSGTW

SEQ ID NO: 27650 - protein, 10 aa, Severe acute respiratory syndrome coronavirus 2
  REGION 1..10: note = N 232-282; Min_EDGE_Nuc; Table F
TKAYNVTQAF

SEQ ID NO: 27651 - protein, 8 aa, Severe acute respiratory syndrome coronavirus 2
  REGION 1..8: note = N 204-239; Min_EDGE_Nuc; Table F
DAALALLL

SEQ ID NO: 27652 - protein, 10 aa, Severe acute respiratory syndrome coronavirus 2
  REGION 1..10: note = N 283-338; Min_EDGE_Nuc; Table F
QFAPSASAFF

SEQ ID NO: 27653 - protein, 9 aa, Severe acute respiratory syndrome coronavirus 2
  REGION 1..9: note = N 345-375; Min_EDGE_Nuc; Table F
LLNKHIDAY

SEQ ID NO: 27654 - protein, 9 aa, Severe acute respiratory syndrome coronavirus 2
  REGION 1..9: note = N 232-282; Min_EDGE_Nuc; Table F
QQQGQTVTK

SEQ ID NO: 27655 - protein, 8 aa, Severe acute respiratory syndrome coronavirus 2
  REGION 1..8: note = N 283-338; Min_EDGE_Nuc; Table F
SAFFGMSR

SEQ ID NO: 27656 - protein, 11 aa, Severe acute respiratory syndrome coronavirus 2
  REGION 1..11: note = N 204-239; Min_EDGE_Nuc; Table F
ALLLLDRLNQL

SEQ ID NO: 27657 - protein, 8 aa, Severe acute respiratory syndrome coronavirus 2
  REGION 1..8: note = N 368-408; Min_EDGE_Nuc; Table F
ETQALPQR

SEQ ID NO: 27658 - protein, 9 aa, Severe acute respiratory syndrome coronavirus 2
  REGION 1..9: note = N 39-94; Min_EDGE_Nuc; Table F
NTASWFTAL

SEQ ID NO: 27659 - protein, 10 aa, Severe acute respiratory syndrome coronavirus 2
  REGION 1..10: note = N 232-282; Min_EDGE_Nuc; Table F
SAAEASKKPR

SEQ ID NO: 27660 - protein, 11 aa, Severe acute respiratory syndrome coronavirus 2
  REGION 1..11: note = N 39-94; Min_EDGE_Nuc; Table F
NSSPDDQIGYY

SEQ ID NO: 27661 - protein, 9 aa, Severe acute respiratory syndrome coronavirus 2
  REGION 1..9: note = N 128-174; Min_EDGE_Nuc; Table F
TRNPANNAA

SEQ ID NO: 27662 - protein, 11 aa, Severe acute respiratory syndrome coronavirus 2
  REGION 1..11: note = N 283-338; Min_EDGE_Nuc; Table F
IGMEVTPSGTW

SEQ ID NO: 27663 - protein, 9 aa, Severe acute respiratory syndrome coronavirus 2
  REGION 1..9: note = N 128-174; Min_EDGE_Nuc; Table F
LPQGTTLPK

SEQ ID NO: 27664 - protein, 10 aa, Severe acute respiratory syndrome coronavirus 2
  REGION 1..10: note = N 204-239; Min_EDGE_Nuc; Table F
ALALLLLDRL

SEQ ID NO: 27665 - protein, 10 aa, Severe acute respiratory syndrome coronavirus 2
  REGION 1..10: note = N 283-338; Min_EDGE_Nuc; Table F
QELIRQGTDY

SEQ ID NO: 27666 - protein, 10 aa, Severe acute respiratory syndrome coronavirus 2
  REGION 1..10: note = N 232-282; Min_EDGE_Nuc; Table F
QQQQGQTVTK

SEQ ID NO: 27667 - protein, 9 aa, Severe acute respiratory syndrome coronavirus 2
  REGION 1..9: note = N 232-282; Min_EDGE_Nuc; Table F
GQTVTKKSA

SEQ ID NO: 27668 - protein, 8 aa, Severe acute respiratory syndrome coronavirus 2
  REGION 1..8: note = N 368-408; Min_EDGE_Nuc; Table F
TVTLLPAA

SEQ ID NO: 27669 - protein, 9 aa, Severe acute respiratory syndrome coronavirus 2
  REGION 1..9: note = N 283-338; Min_EDGE_Nuc; Table F
SAFFGMSRI

SEQ ID NO: 27670 - protein, 10 aa, Severe acute respiratory syndrome coronavirus 2
  REGION 1..10: note = N 204-239; Min_EDGE_Nuc; Table F
MAGNGGDAAL

SEQ ID NO: 27671 - protein, 9 aa, Severe acute respiratory syndrome coronavirus 2
  REGION 1..9: note = N 283-338; Min_EDGE_Nuc; Table F
AQFAPSASA

SEQ ID NO: 27672 - protein, 8 aa, Severe acute respiratory syndrome coronavirus 2
  REGION 1..8: note = N 368-408; Min_EDGE_Nuc; Table F
KADETQAL

SEQ ID NO: 27673 - protein, 9 aa, Severe acute respiratory syndrome coronavirus 2
  REGION 1..9: note = N 345-375; Min_EDGE_Nuc; Table F
KHIDAYKTF

SEQ ID NO: 27674 - protein, 9 aa, Severe acute respiratory syndrome coronavirus 2
  REGION 1..9: note = N 39-94; Min_EDGE_Nuc; Table F
FTALTQHGK

SEQ ID NO: 27675 - protein, 10 aa, Severe acute respiratory syndrome coronavirus 2
  REGION 1..10: note = N 232-282; Min_EDGE_Nuc; Table F
QQQGQTVTKK

SEQ ID NO: 27676 - protein, 11 aa, Severe acute respiratory syndrome coronavirus 2
  REGION 1..11: note = N 232-282; Min_EDGE_Nuc; Table F
KSAAEASKKPR

SEQ ID NO: 27677 - protein, 9 aa, Severe acute respiratory syndrome coronavirus 2
  REGION 1..9: note = N 368-408; Min_EDGE_Nuc; Table F
DETQALPQR

SEQ ID NO: 27678 - protein, 10 aa, Severe acute respiratory syndrome coronavirus 2
  REGION 1..10: note = N 39-94; Min_EDGE_Nuc; Table F
SSPDDQIGYY

SEQ ID NO: 27679 - protein, 11 aa, Severe acute respiratory syndrome coronavirus 2
  REGION 1..11: note = N 283-338; Min_EDGE_Nuc; Table F
EVTPSGTWLTY

SEQ ID NO: 27680 - protein, 8 aa, Severe acute respiratory syndrome coronavirus 2
  REGION 1..8: note = N 368-408; Min_EDGE_Nuc; Table F
RQKKQQTV

SEQ ID NO: 27681 - protein, 11 aa, Severe acute respiratory syndrome coronavirus 2
  REGION 1..11: note = N 39-94; Min_EDGE_Nuc; Table F
SSPDDQIGYYR

SEQ ID NO: 27682 - protein, 11 aa, Severe acute respiratory syndrome coronavirus 2
  REGION 1..11: note = N 128-174; Min_EDGE_Nuc; Table F
IVLQLPQGTTL

SEQ ID NO: 27683 - protein, 9 aa, Severe acute respiratory syndrome coronavirus 2
  REGION 1..9: note = N 368-408; Min_EDGE_Nuc; Table F
KKADETQAL

SEQ ID NO: 27684 - protein, 10 aa, Severe acute respiratory syndrome coronavirus 2
  REGION 1..10: note = N 128-174; Min_EDGE_Nuc; Table F
QLPQGTTLPK

SEQ ID NO: 27685 - protein, 9 aa, Severe acute respiratory syndrome coronavirus 2
  REGION 1..9: note = N 283-338; Min_EDGE_Nuc; Table F
RQGTDYKHW

SEQ ID NO: 27686 - protein, 9 aa, Severe acute respiratory syndrome coronavirus 2
  REGION 1..9: note = N 39-94; Min_EDGE_Nuc; Table F
DDQIGYYRR

SEQ ID NO: 27687 - protein, 9 aa, Severe acute respiratory syndrome coronavirus 2
  REGION 1..9: note = N 204-239; Min_EDGE_Nuc; Table F
AGNGGDAAL

SEQ ID NO: 27688 - protein, 9 aa, Severe acute respiratory syndrome coronavirus 2
  REGION 1..9: note = N 232-282; Min_EDGE_Nuc; Table F
RTATKAYNV

SEQ ID NO: 27689 - protein, 10 aa, Severe acute respiratory syndrome coronavirus 2
  REGION 1..10: note = N 345-375; Min_EDGE_Nuc; Table F
ILLNKHIDAY

SEQ ID NO: 27690 - protein, 8 aa, Severe acute respiratory syndrome coronavirus 2
  REGION 1..8: note = N 283-338; Min_EDGE_Nuc; Table F
LIRQGTDY

SEQ ID NO: 27691 - protein, 10 aa, Severe acute respiratory syndrome coronavirus 2
  REGION 1..10: note = N 128-174; Min_EDGE_Nuc; Table F
NTPKDHIGTR

SEQ ID NO: 27692 - protein, 9 aa, Severe acute respiratory syndrome coronavirus 2
  REGION 1..9: note = N 232-282; Min_EDGE_Nuc; Table F
EASKKPRQK

SEQ ID NO: 27693 - protein, 9 aa, Severe acute respiratory syndrome coronavirus 2
  REGION 1..9: note = N 283-338; Min_EDGE_Nuc; Table F
FAPSASAFF

SEQ ID NO: 27694 - protein, 8 aa, Severe acute respiratory syndrome coronavirus 2
  REGION 1..8: note = N 39-94; Min_EDGE_Nuc; Table F
LPNNTASW

SEQ ID NO: 27695 - protein, 10 aa, Severe acute respiratory syndrome coronavirus 2
  REGION 1..10: note = N 283-338; Min_EDGE_Nuc; Table F
SASAFFGMSR

SEQ ID NO: 27696 - protein, 8 aa, Severe acute respiratory syndrome coronavirus 2
  REGION 1..8: note = N 128-174; Min_EDGE_Nuc; Table F
NAAIVLQL

SEQ ID NO: 27697 - protein, 10 aa, Severe acute respiratory syndrome coronavirus 2
  REGION 1..10: note = N 232-282; Min_EDGE_Nuc; Table F
RQKRTATKAY

SEQ ID NO: 27698 - protein, 10 aa, Severe acute respiratory syndrome coronavirus 2
  REGION 1..10: note = N 283-338; Min_EDGE_Nuc; Table F
YKHWPQIAQF

SEQ ID NO: 27699 - protein, 9 aa, Severe acute respiratory syndrome coronavirus 2
  REGION 1..9: note = N 232-282; Min_EDGE_Nuc; Table F
QKRTATKAY

SEQ ID NO: 27700 - protein, 9 aa, Severe acute respiratory syndrome coronavirus 2
  REGION 1..9: note = N 368-408; Min_EDGE_Nuc; Table F
TQALPQRQK

SEQ ID NO: 27701 - protein, 10 aa, Severe acute respiratory syndrome coronavirus 2
  REGION 1..10: note = N 283-338; Min_EDGE_Nuc; Table F
APSASAFFGM

SEQ ID NO: 27702 - protein, 10 aa, Severe acute respiratory syndrome coronavirus 2
  REGION 1..10: note = ORF3a 12-55; Min_EDGE_ORF3a; Table F
TPSDFVRATA

SEQ ID NO: 27703 - protein, 9 aa, Severe acute respiratory syndrome coronavirus 2
  REGION 1..9: note = ORF3a 198-254; Min_EDGE_ORF3a; Table F
IVDEPEEHV

SEQ ID NO: 27704 - protein, 10 aa, Severe acute respiratory syndrome coronavirus 2
  REGION 1..10: note = ORF3a 168-198; Min_EDGE_ORF3a; Table F
YQIGGYTEKW

SEQ ID NO: 27705 - protein, 11 aa, Severe acute respiratory syndrome coronavirus 2
  REGION 1..11: note = ORF3a 168-198; Min_EDGE_ORF3a; Table F
GTTSPISEHDY

SEQ ID NO: 27706 - protein, 10 aa, Severe acute respiratory syndrome coronavirus 2
  REGION 1..10: note = ORF3a 168-198; Min_EDGE_ORF3a; Table F
TTSPISEHDY

SEQ ID NO: 27707 - protein, 10 aa, Severe acute respiratory syndrome coronavirus 2
  REGION 1..10: note = ORF3a 12-55; Min_EDGE_ORF3a; Table F
EIKDATPSDF

SEQ ID NO: 27708 - protein, 9 aa, Severe acute respiratory syndrome coronavirus 2
  REGION 1..9: note = ORF3a 198-254; Min_EDGE_ORF3a; Table F
EEHVQIHTI

SEQ ID NO: 27709 - protein, 9 aa, Severe acute respiratory syndrome coronavirus 2
  REGION 1..9: note = ORF3a 101-152; Min_EDGE_ORF3a; Table F
QSINFVRII

SEQ ID NO: 27710 - protein, 8 aa, Severe acute respiratory syndrome coronavirus 2
  REGION 1..8: note = ORF3a 52-85; Min_EDGE_ORF3a; Table F
SASKIITL

SEQ ID NO: 27711 - protein, 9 aa, Severe acute respiratory syndrome coronavirus 2
  REGION 1..9: note = ORF3a 198-254; Min_EDGE_ORF3a; Table F
HSYFTSDYY

SEQ ID NO: 27712 - protein, 11 aa, Severe acute respiratory syndrome coronavirus 2
  REGION 1..11: note = ORF3a 198-254; Min_EDGE_ORF3a; Table F
IVDEPEEHVQI

SEQ ID NO: 27713 - protein, 8 aa, Severe acute respiratory syndrome coronavirus 2
  REGION 1..8: note = ORF3a 101-152; Min_EDGE_ORF3a; Table F
RSKNPLLY

SEQ ID NO: 27714 - protein, 9 aa, Severe acute respiratory syndrome coronavirus 2
  REGION 1..9: note = ORF3a 12-55; Min_EDGE_ORF3a; Table F
ATIPIQASL

SEQ ID NO: 27715 - protein, 8 aa, Severe acute respiratory syndrome coronavirus 2
  REGION 1..8: note = ORF3a 198-254; Min_EDGE_ORF3a; Table F
EHVQIHTI

SEQ ID NO: 27716 - protein, 9 aa, Severe acute respiratory syndrome coronavirus 2
  REGION 1..9: note = ORF3a 52-85; Min_EDGE_ORF3a; Table F
ITLKKRWQL

SEQ ID NO: 27717 - protein, 8 aa, Severe acute respiratory syndrome coronavirus 2
  REGION 1..8: note = ORF3a 198-254; Min_EDGE_ORF3a; Table F
SYFTSDYY

SEQ ID NO: 27718 - protein, 10 aa, Severe acute respiratory syndrome coronavirus 2
  REGION 1..10: note = ORF3a 198-254; Min_EDGE_ORF3a; Table F
YFTSDYYQLY

SEQ ID NO: 27719 - protein, 11 aa, Severe acute respiratory syndrome coronavirus 2
  REGION 1..11: note = ORF3a 198-254; Min_EDGE_ORF3a; Table F
STDTGVEHVTF

SEQ ID NO: 27720 - protein, 9 aa, Severe acute respiratory syndrome coronavirus 2
  REGION 1..9: note = ORF3a 12-55; Min_EDGE_ORF3a; Table F
DATPSDFVR

SEQ ID NO: 27721 - protein, 9 aa, Severe acute respiratory syndrome coronavirus 2
  REGION 1..9: note = ORF3a 168-198; Min_EDGE_ORF3a; Table F
EHDYQIGGY

SEQ ID NO: 27722 - protein, 9 aa, Severe acute respiratory syndrome coronavirus 2
  REGION 1..9: note = ORF3a 198-254; Min_EDGE_ORF3a; Table F
STDTGVEHV

SEQ ID NO: 27723 - protein, 8 aa, Severe acute respiratory syndrome coronavirus 2
  REGION 1..8: note = ORF3a 168-198; Min_EDGE_ORF3a; Table F
IGGYTEKW

SEQ ID NO: 27724 - protein, 11 aa, Severe acute respiratory syndrome coronavirus 2
  REGION 1..11: note = ORF3a 12-55; Min_EDGE_ORF3a; Table F
IPIQASLPFGW

SEQ ID NO: 27725 - protein, 11 aa, Severe acute respiratory syndrome coronavirus 2
  REGION 1..11: note = ORF3a 12-55; Min_EDGE_ORF3a; Table F
GEIKDATPSDF

SEQ ID NO: 27726 - protein, 10 aa, Severe acute respiratory syndrome coronavirus 2
  REGION 1..10: note = ORF3a 168-198; Min_EDGE_ORF3a; Table F
SPISEHDYQI

SEQ ID NO: 27727 - protein, 9 aa, Severe acute respiratory syndrome coronavirus 2
  REGION 1..9: note = ORF3a 101-152; Min_EDGE_ORF3a; Table F
ALVYFLQSI

SEQ ID NO: 27728 - protein, 9 aa, Severe acute respiratory syndrome coronavirus 2
  REGION 1..9: note = ORF3a 12-55; Min_EDGE_ORF3a; Table F
TPSDFVRAT

SEQ ID NO: 27729 - protein, 9 aa, Severe acute respiratory syndrome coronavirus 2
  REGION 1..9: note = ORF3a 101-152; Min_EDGE_ORF3a; Table F
NPLLYDANY

SEQ ID NO: 27730 - protein, 10 aa, Severe acute respiratory syndrome coronavirus 2
  REGION 1..10: note = ORF3a 168-198; Min_EDGE_ORF3a; Table F
SEHDYQIGGY

SEQ ID NO: 27731 - protein, 9 aa, Severe acute respiratory syndrome coronavirus 2
  REGION 1..9: note = ORF3a 101-152; Min_EDGE_ORF3a; Table F
FLQSINFVR

SEQ ID NO: 27732 - protein, 9 aa, Severe acute respiratory syndrome coronavirus 2
  REGION 1..9: note = ORF3a 198-254; Min_EDGE_ORF3a; Table F
HVTFFIYNK

SEQ ID NO: 27733 - protein, 8 aa, Severe acute respiratory syndrome coronavirus 2
  REGION 1..8: note = ORF3a 52-85; Min_EDGE_ORF3a; Table F
TLKKRWQL

SEQ ID NO: 27734 - protein, 11 aa, Severe acute respiratory syndrome coronavirus 2
  REGION 1..11: note = ORF3a 198-254; Min_EDGE_ORF3a; Table F
SYFTSDYYQLY

SEQ ID NO: 27735 - protein, 11 aa, Severe acute respiratory syndrome coronavirus 2
  REGION 1..11: note = ORF3a 198-254; Min_EDGE_ORF3a; Table F
QLSTDTGVEHV

SEQ ID NO: 27736 - protein, 8 aa, Severe acute respiratory syndrome coronavirus 2
  REGION 1..8: note = ORF3a 12-55; Min_EDGE_ORF3a; Table F
LPFGWLIV

SEQ ID NO: 27737 - protein, 9 aa, Severe acute respiratory syndrome coronavirus 2
  REGION 1..9: note = ORF3a 198-254; Min_EDGE_ORF3a; Table F
VTFFIYNKI

SEQ ID NO: 27738 - protein, 8 aa, Severe acute respiratory syndrome coronavirus 2
  REGION 1..8: note = ORF3a 198-254; Min_EDGE_ORF3a; Table F
TSDYYQLY

SEQ ID NO: 27739 - protein, 9 aa, Severe acute respiratory syndrome coronavirus 2
  REGION 1..9: note = ORF3a 198-254; Min_EDGE_ORF3a; Table F
YFTSDYYQL

SEQ ID NO: 27740 - protein, 8 aa, Severe acute respiratory syndrome coronavirus 2
  REGION 1..8: note = ORF3a 12-55; Min_EDGE_ORF3a; Table F
TPSDFVRA

SEQ ID NO: 27741 - protein, 9 aa, Severe acute respiratory syndrome coronavirus 2
  REGION 1..9: note = ORF3a 168-198; Min_EDGE_ORF3a; Table F
QIGGYTEKW

SEQ ID NO: 27742 - protein, 10 aa, Severe acute respiratory syndrome coronavirus 2
  REGION 1..10: note = ORF3a 198-254; Min_EDGE_ORF3a; Table F
TDTGVEHVTF

SEQ ID NO: 27743 - protein, 9 aa, Severe acute respiratory syndrome coronavirus 2
  REGION 1..9: note = ORF3a 101-152; Min_EDGE_ORF3a; Table F
SINFVRIIM

SEQ ID NO: 27744 - protein, 9 aa, Severe acute respiratory syndrome coronavirus 2
  REGION 1..9: note = ORF3a 52-85; Min_EDGE_ORF3a; Table F
KRWQLALSK

SEQ ID NO: 27745 - protein, 9 aa, Severe acute respiratory syndrome coronavirus 2
  REGION 1..9: note = ORF3a 12-55; Min_EDGE_ORF3a; Table F
ATATIPIQA

SEQ ID NO: 27746 - protein, 9 aa, Severe acute respiratory syndrome coronavirus 2
  REGION 1..9: note = ORF3a 198-254; Min_EDGE_ORF3a; Table F
TGVEHVTFF

SEQ ID NO: 27747 - protein, 9 aa, Severe acute respiratory syndrome coronavirus 2
  REGION 1..9: note = ORF3a 198-254; Min_EDGE_ORF3a; Table F
TQLSTDTGV

SEQ ID NO: 27748 - protein, 9 aa, Severe acute respiratory syndrome coronavirus 2
  REGION 1..9: note = ORF3a 52-85; Min_EDGE_ORF3a; Table F
ASKIITLKK

SEQ ID NO: 27749 - protein, 10 aa, Severe acute respiratory syndrome coronavirus 2
  REGION 1..10: note = ORF3a 12-55; Min_EDGE_ORF3a; Table F
LPFGWLIVGV

SEQ ID NO: 27750 - protein, 11 aa, Severe acute respiratory syndrome coronavirus 2
  REGION 1..11: note = ORF3a 12-55; Min_EDGE_ORF3a; Table F
EIKDATPSDFV

SEQ ID NO: 27751 - protein, 8 aa, Severe acute respiratory syndrome coronavirus 2
  REGION 1..8: note = N 368-408; Min_EDGE_Nuc_expl.; Table F
KQQTVTLL

SEQ ID NO: 27752 - protein, 8 aa, Severe acute respiratory syndrome coronavirus 2
  REGION 1..8: note = N 128-174; Min_EDGE_Nuc_expl.; Table F
PQGTTLPK

SEQ ID NO: 27753 - protein, 11 aa, Severe acute respiratory syndrome coronavirus 2
  REGION 1..11: note = N 204-239; Min_EDGE_Nuc_expl.; Table F
RMAGNGGDAAL

SEQ ID NO: 27754 - protein, 8 aa, Severe acute respiratory syndrome coronavirus 2
  REGION 1..8: note = N 232-282; Min_EDGE_Nuc_expl.; Table F
NVTQAFGR

SEQ ID NO: 27755 - protein, 11 aa, Severe acute respiratory syndrome coronavirus 2
  REGION 1..11: note = N 232-282; Min_EDGE_Nuc_expl.; Table F
ATKAYNVTQAF

SEQ ID NO: 27756 - protein, 10 aa, Severe acute respiratory syndrome coronavirus 2
  REGION 1..10: note = N 232-282; Min_EDGE_Nuc_expl.; Table F
KAYNVTQAFG

SEQ ID NO: 27757 - protein, 9 aa, Severe acute respiratory syndrome coronavirus 2
  REGION 1..9: note = N 128-174; Min_EDGE_Nuc_expl.; Table F
DHIGTRNPA

SEQ ID NO: 27758 - protein, 9 aa, Severe acute respiratory syndrome coronavirus 2
  REGION 1..9: note = N 368-408; Min_EDGE_Nuc_expl.; Table F
KKQQTVTLL

SEQ ID NO: 27759 - protein, 8 aa, Severe acute respiratory syndrome coronavirus 2
  REGION 1..8: note = N 39-94; Min_EDGE_Nuc_expl.; Table F
DDQIGYYR

SEQ ID NO: 27760 - protein, 8 aa, Severe acute respiratory syndrome coronavirus 2
  REGION 1..8: note = N 232-282; Min_EDGE_Nuc_expl.; Table F
QQQQGQTV

SEQ ID NO: 27761 - protein, 8 aa, Severe acute respiratory syndrome coronavirus 2
  REGION 1..8: note = N 283-338; Min_EDGE_Nuc_expl.; Table F
MSRIGMEV

SEQ ID NO: 27762 - protein, 8 aa, Severe acute respiratory syndrome coronavirus 2
  REGION 1..8: note = N 128-174; Min_EDGE_Nuc_expl.; Table F
QLPQGTTL

SEQ ID NO: 27763 - protein, 10 aa, Severe acute respiratory syndrome coronavirus 2
  REGION 1..10: note = N 39-94; Min_EDGE_Nuc_expl.; Table F
NSSPDDQIGY

SEQ ID NO: 27764 - protein, 9 aa, Severe acute respiratory syndrome coronavirus 2
  REGION 1..9: note = N 283-338; Min_EDGE_Nuc_expl.; Table F
FFGMSRIGM

SEQ ID NO: 27765 - protein, 11 aa, Severe acute respiratory syndrome coronavirus 2
  REGION 1..11: note = N 232-282; Min_EDGE_Nuc_expl.; Table F
QQQQGQTVTKK

SEQ ID NO: 27766 - protein, 11 aa, Severe acute respiratory syndrome coronavirus 2
  REGION 1..11: note = N 39-94; Min_EDGE_Nuc_expl.; Table F
LPNNTASWFTA

SEQ ID NO: 27767 - protein, 8 aa, Severe acute respiratory syndrome coronavirus 2
  REGION 1..8: note = N 39-94; Min_EDGE_Nuc_expl.; Table F
SPDDQIGY

SEQ ID NO: 27768 - protein, 10 aa, Severe acute respiratory syndrome coronavirus 2
  REGION 1..10: note = N 39-94; Min_EDGE_Nuc_expl.; Table F
SPDDQIGYYR

SEQ ID NO: 27769 - protein, 9 aa, Severe acute respiratory syndrome coronavirus 2
  REGION 1..9: note = N 283-338; Min_EDGE_Nuc_expl.; Table F
TDYKHWPQI

SEQ ID NO: 27770 - protein, 9 aa, Severe acute respiratory syndrome coronavirus 2
  REGION 1..9: note = N 232-282; Min_EDGE_Nuc_expl.; Table F
YNVTQAFGR

SEQ ID NO: 27771 - protein, 11 aa, Severe acute respiratory syndrome coronavirus 2
  REGION 1..11: note = N 368-408; Min_EDGE_Nuc_expl.; Table F
KADETQALPQR

SEQ ID NO: 27772 - protein, 9 aa, Severe acute respiratory syndrome coronavirus 2
  REGION 1..9: note = N 128-174; Min_EDGE_Nuc_expl.; Table F
PANNAAIVL

SEQ ID NO: 27773 - protein, 9 aa, Severe acute respiratory syndrome coronavirus 2
  REGION 1..9: note = N 39-94; Min_EDGE_Nuc_expl.; Table F
GLPNNTASW

SEQ ID NO: 27774 - protein, 8 aa, Severe acute respiratory syndrome coronavirus 2
  REGION 1..8: note = N 283-338; Min_EDGE_Nuc_expl.; Table F
FAPSASAF

SEQ ID NO: 27775 - protein, 8 aa, Severe acute respiratory syndrome coronavirus 2
  REGION 1..8: note = N 283-338; Min_EDGE_Nuc_expl.; Table F
FGMSRIGM

SEQ ID NO: 27776 - protein, 10 aa, Severe acute respiratory syndrome coronavirus 2
  REGION 1..10: note = N 283-338; Min_EDGE_Nuc_expl.; Table F
VTPSGTWLTY

SEQ ID NO: 27777 - protein, 8 aa, Severe acute respiratory syndrome coronavirus 2
  REGION 1..8: note = N 204-239; Min_EDGE_Nuc_expl.; Table F
LLDRLNQL

SEQ ID NO: 27778 - protein, 8 aa, Severe acute respiratory syndrome coronavirus 2
  REGION 1..8: note = N 283-338; Min_EDGE_Nuc_expl.; Table F
APSASAFF

SEQ ID NO: 27779 - protein, 9 aa, Severe acute respiratory syndrome coronavirus 2
  REGION 1..9: note = N 368-408; Min_EDGE_Nuc_expl.; Table F
QTVTLLPAA

SEQ ID NO: 27780 - protein, 10 aa, Severe acute respiratory syndrome coronavirus 2
  REGION 1..10: note = N 204-239; Min_EDGE_Nuc_expl.; Table F
DRLNQLESKM

SEQ ID NO: 27781 - protein, 9 aa, Severe acute respiratory syndrome coronavirus 2
  REGION 1..9: note = N 204-239; Min_EDGE_Nuc_expl.; Table F
NGGDAALAL

SEQ ID NO: 27782 - protein, 9 aa, Severe acute respiratory syndrome coronavirus 2
  REGION 1..9: note = N 204-239; Min_EDGE_Nuc_expl.; Table F
DAALALLLL

SEQ ID NO: 27783 - protein, 8 aa, Severe acute respiratory syndrome coronavirus 2
  REGION 1..8: note = N 232-282; Min_EDGE_Nuc_expl.; Table F
TATKAYNV

SEQ ID NO: 27784 - protein, 9 aa, Severe acute respiratory syndrome coronavirus 2
  REGION 1..9: note = N 232-282; Min_EDGE_Nuc_expl.; Table F
QQGQTVTKK

SEQ ID NO: 27785 - protein, 11 aa, Severe acute respiratory syndrome coronavirus 2
  REGION 1..11: note = N 39-94; Min_EDGE_Nuc_expl.; Table F
LTQHGKEDLKF

SEQ ID NO: 27786 - protein, 8 aa, Severe acute respiratory syndrome coronavirus 2
  REGION 1..8: note = N 283-338; Min_EDGE_Nuc_expl.; Table F
AFFGMSRI

SEQ ID NO: 27787 - protein, 10 aa, Severe acute respiratory syndrome coronavirus 2
  REGION 1..10: note = N 368-408; Min_EDGE_Nuc_expl.; Table F
RQKKQQTVTL

SEQ ID NO: 27788 - protein, 9 aa, Severe acute respiratory syndrome coronavirus 2
  REGION 1..9: note = N 128-174; Min_EDGE_Nuc_expl.; Table F
NNAAIVLQL

SEQ ID NO: 27789 - protein, 10 aa, Severe acute respiratory syndrome coronavirus 2
  REGION 1..10: note = N 283-338; Min_EDGE_Nuc_expl.; Table F
AFFGMSRIGM

SEQ ID NO: 27790 - protein, 11 aa, Severe acute respiratory syndrome coronavirus 2
  REGION 1..11: note = N 128-174; Min_EDGE_Nuc_expl.; Table F
LQLPQGTTLPK

SEQ ID NO: 27791 - protein, 9 aa, Severe acute respiratory syndrome coronavirus 2
  REGION 1..9: note = N 39-94; Min_EDGE_Nuc_expl.; Table F
SWFTALTQH

SEQ ID NO: 27792 - protein, 11 aa, Severe acute respiratory syndrome coronavirus 2
  REGION 1..11: note = N 283-338; Min_EDGE_Nuc_expl.; Table F
GMSRIGMEVTP

SEQ ID NO: 27793 - protein, 9 aa, Severe acute respiratory syndrome coronavirus 2
  REGION 1..9: note = N 368-408; Min_EDGE_Nuc_expl.; Table F
QKKQQTVTL

SEQ ID NO: 27794 - protein, 9 aa, Severe acute respiratory syndrome coronavirus 2
  REGION 1..9: note = N 232-282; Min_EDGE_Nuc_expl.; Table F
TKAYNVTQA

SEQ ID NO: 27795 - protein, 11 aa, Severe acute respiratory syndrome coronavirus 2
  REGION 1..11: note = N 345-375; Min_EDGE_Nuc_expl.; Table F
VILLNKHIDAY

SEQ ID NO: 27796 - protein, 10 aa, Severe acute respiratory syndrome coronavirus 2
  REGION 1..10: note = N 39-94; Min_EDGE_Nuc_expl.; Table F
QGLPNNTASW

SEQ ID NO: 27797 - protein, 10 aa, Severe acute respiratory syndrome coronavirus 2
  REGION 1..10: note = N 39-94; Min_EDGE_Nuc_expl.; Table F
HGKEDLKFPR

SEQ ID NO: 27798 - protein, 9 aa, Severe acute respiratory syndrome coronavirus 2
  REGION 1..9: note = N 368-408; Min_EDGE_Nuc_expl.; Table F
KQQTVTLLP

SEQ ID NO: 27799 - protein, 11 aa, Severe acute respiratory syndrome coronavirus 2
  REGION 1..11: note = N 368-408; Min_EDGE_Nuc_expl.; Table F
TLLPAADLDDF

SEQ ID NO: 27800 - protein, 9 aa, Severe acute respiratory syndrome coronavirus 2
  REGION 1..9: note = N 232-282; Min_EDGE_Nuc_expl.; Table F
ATKAYNVTQ

SEQ ID NO: 27801 - protein, 11 aa, Severe acute respiratory syndrome coronavirus 2
  REGION 1..11: note = N 368-408; Min_EDGE_Nuc_expl.; Table F
LPQRQKKQQTV

SEQ ID NO: 27802 - protein, 9 aa, Severe acute respiratory syndrome coronavirus 2
  REGION 1..9: note = N 128-174; Min_EDGE_Nuc_expl.; Table F
TEGALNTPK

SEQ ID NO: 27803 - protein, 9 aa, Severe acute respiratory syndrome coronavirus 2
  REGION 1..9: note = N 368-408; Min_EDGE_Nuc_expl.; Table F
ETQALPQRQ

SEQ ID NO: 27804 - protein, 9 aa, Severe acute respiratory syndrome coronavirus 2
  REGION 1..9: note = N 283-338; Min_EDGE_Nuc_expl.; Table F
EVTPSGTWL

SEQ ID NO: 27805 - protein, 9 aa, Severe acute respiratory syndrome coronavirus 2
  REGION 1..9: note = N 368-408; Min_EDGE_Nuc_expl.; Table F
QQTVTLLPA

SEQ ID NO: 27806 - protein, 11 aa, Severe acute respiratory syndrome coronavirus 2
  REGION 1..11: note = N 128-174; Min_EDGE_Nuc_expl.; Table F
LNTPKDHIGTR

SEQ ID NO: 27807 - protein, 9 aa, Severe acute respiratory syndrome coronavirus 2
  REGION 1..9: note = N 128-174; Min_EDGE_Nuc_expl.; Table F
NPANNAAIV

SEQ ID NO: 27808 - protein, 11 aa, Severe acute respiratory syndrome coronavirus 2
  REGION 1..11: note = N 128-174; Min_EDGE_Nuc_expl.; Table F
VATEGALNTPK

SEQ ID NO: 27809 - protein, 8 aa, Severe acute respiratory syndrome coronavirus 2
  REGION 1..8: note = N 128-174; Min_EDGE_Nuc_expl.; Table F
NPANNAAI

SEQ ID NO: 27810 - protein, 10 aa, Severe acute respiratory syndrome coronavirus 2
  REGION 1..10: note = N 283-338; Min_EDGE_Nuc_expl.; Table F
TDYKHWPQIA

SEQ ID NO: 27811 - protein, 8 aa, Severe acute respiratory syndrome coronavirus 2
  REGION 1..8: note = N 39-94; Min_EDGE_Nuc_expl.; Table F
PDDQIGYY

SEQ ID NO: 27812 - protein, 9 aa, Severe acute respiratory syndrome coronavirus 2
  REGION 1..9: note = N 283-338; Min_EDGE_Nuc_expl.; Table F
QIAQFAPSA

SEQ ID NO: 27813 - protein, 8 aa, Severe acute respiratory syndrome coronavirus 2
  REGION 1..8: note = N 345-375; Min_EDGE_Nuc_expl.; Table F
LNKHIDAY

SEQ ID NO: 27814 - protein, 11 aa, Severe acute respiratory syndrome coronavirus 2
  REGION 1..11: note = N 345-375; Min_EDGE_Nuc_expl.; Table F
AYKTFPPTEPK

SEQ ID NO: 27815 - protein, 8 aa, Severe acute respiratory syndrome coronavirus 2
  REGION 1..8: note = N 232-282; Min_EDGE_Nuc_expl.; Table F
QQGQTVTK

SEQ ID NO: 27816 - protein, 9 aa, Severe acute respiratory syndrome coronavirus 2
  REGION 1..9: note = N 232-282; Min_EDGE_Nuc_expl.; Table F
QQQQGQTVT

SEQ ID NO: 27817 - protein, 9 aa, Severe acute respiratory syndrome coronavirus 2
  REGION 1..9: note = N 283-338; Min_EDGE_Nuc_expl.; Table F
SRIGMEVTP

SEQ ID NO: 27818 - protein, 10 aa, Severe acute respiratory syndrome coronavirus 2
  REGION 1..10: note = N 232-282; Min_EDGE_Nuc_expl.; Table F
AYNVTQAFGR

SEQ ID NO: 27819 - protein, 9 aa, Severe acute respiratory syndrome coronavirus 2
  REGION 1..9: note = N 368-408; Min_EDGE_Nuc_expl.; Table F
QALPQRQKK

SEQ ID NO: 27820 - protein, 10 aa, Severe acute respiratory syndrome coronavirus 2
  REGION 1..10: note = N 128-174; Min_EDGE_Nuc_expl.; Table F
TRNPANNAAI

SEQ ID NO: 27821 - protein, 8 aa, Severe acute respiratory syndrome coronavirus 2
  REGION 1..8: note = N 283-338; Min_EDGE_Nuc_expl.; Table F
VTPSGTWL

SEQ ID NO: 27822 - protein, 9 aa, Severe acute respiratory syndrome coronavirus 2
  REGION 1..9: note = N 39-94; Min_EDGE_Nuc_expl.; Table F
LPNNTASWF

SEQ ID NO: 27823 - protein, 9 aa, Severe acute respiratory syndrome coronavirus 2
  REGION 1..9: note = N 99-118; Min_EDGE_Nuc_expl.; Table F
LSPRWYFYY

SEQ ID NO: 27824 - protein, 10 aa, Severe acute respiratory syndrome coronavirus 2
  REGION 1..10: note = N 232-282; Min_EDGE_Nuc_expl.; Table F
GQQQQGQTVT

SEQ ID NO: 27825 - protein, 11 aa, Severe acute respiratory syndrome coronavirus 2
  REGION 1..11: note = N 283-338; Min_EDGE_Nuc_expl.; Table F
DQELIRQGTDY

SEQ ID NO: 27826 - protein, 9 aa, Severe acute respiratory syndrome coronavirus 2
  REGION 1..9: note = N 283-338; Min_EDGE_Nuc_expl.; Table F
LIRQGTDYK

SEQ ID NO: 27827 - protein, 10 aa, Severe acute respiratory syndrome coronavirus 2
  REGION 1..10: note = N 368-408; Min_EDGE_Nuc_expl.; Table F
KADETQALPQ

SEQ ID NO: 27828 - protein, 11 aa, Severe acute respiratory syndrome coronavirus 2
  REGION 1..11: note = N 204-239; Min_EDGE_Nuc_expl.; Table F
RLNQLESKMSG

SEQ ID NO: 27829 - protein, 9 aa, Severe acute respiratory syndrome coronavirus 2
  REGION 1..9: note = N 232-282; Min_EDGE_Nuc_expl.; Table F
VTKKSAAEA

SEQ ID NO: 27830 - protein, 8 aa, Severe acute respiratory syndrome coronavirus 2
  REGION 1..8: note = N 368-408; Min_EDGE_Nuc_expl.; Table F
KKQQTVTL

SEQ ID NO: 27831 - protein, 8 aa, Severe acute respiratory syndrome coronavirus 2
  REGION 1..8: note = N 368-408; Min_EDGE_Nuc_expl.; Table F
QALPQRQK

SEQ ID NO: 27832 - protein, 8 aa, Severe acute respiratory syndrome coronavirus 2
  REGION 1..8: note = N 232-282; Min_EDGE_Nuc_expl.; Table F
QGQTVTKK

SEQ ID NO: 27833 - protein, 10 aa, Severe acute respiratory syndrome coronavirus 2
  REGION 1..10: note = N 283-338; Min_EDGE_Nuc_expl.; Table F
FGMSRIGMEV

SEQ ID NO: 27834 - protein, 8 aa, Severe acute respiratory syndrome coronavirus 2
  REGION 1..8: note = N 345-375; Min_EDGE_Nuc_expl.; Table F
KTFPPTEP

SEQ ID NO: 27835 - protein, 10 aa, Severe acute respiratory syndrome coronavirus 2
  REGION 1..10: note = N 232-282; Min_EDGE_Nuc_expl.; Table F
YNVTQAFGRR

SEQ ID NO: 27836 - protein, 10 aa, Severe acute respiratory syndrome coronavirus 2
  REGION 1..10: note = N 283-338; Min_EDGE_Nuc_expl.; Table F
ELIRQGTDYK

SEQ ID NO: 27837 - protein, 11 aa, Severe acute respiratory syndrome coronavirus 2
  REGION 1..11: note = N 283-338; Min_EDGE_Nuc_expl.; Table F
WPQIAQFAPSA

SEQ ID NO: 27838 - protein, 11 aa, Severe acute respiratory syndrome coronavirus 2
  REGION 1..11: note = N 368-408; Min_EDGE_Nuc_expl.; Table F
ETQALPQRQKK

SEQ ID NO: 27839 - protein, 9 aa, Severe acute respiratory syndrome coronavirus 2
  REGION 1..9: note = ORF3a 101-152; Min_EDGE_ORF3a_expl.; Table F
SKNPLLYDA

SEQ ID NO: 27840 - protein, 11 aa, Severe acute respiratory syndrome coronavirus 2
  REGION 1..11: note = ORF3a 168-198; Min_EDGE_ORF3a_expl.; Table F
ISEHDYQIGGY

SEQ ID NO: 27841 - protein, 9 aa, Severe acute respiratory syndrome coronavirus 2
  REGION 1..9: note = ORF3a 12-55; Min_EDGE_ORF3a_expl.; Table F
ATPSDFVRA

SEQ ID NO: 27842 - protein, 10 aa, Severe acute respiratory syndrome coronavirus 2
  REGION 1..10: note = ORF3a 101-152; Min_EDGE_ORF3a_expl.; Table F
SINFVRIIMR

SEQ ID NO: 27843 - protein, 10 aa, Severe acute respiratory syndrome coronavirus 2
  REGION 1..10: note = ORF3a 52-85; Min_EDGE_ORF3a_expl.; Table F
SASKIITLKK

SEQ ID NO: 27844 - protein, 8 aa, Severe acute respiratory syndrome coronavirus 2
  REGION 1..8: note = ORF3a 198-254; Min_EDGE_ORF3a_expl.; Table F
VEHVTFFI

SEQ ID NO: 27845 - protein, 9 aa, Severe acute respiratory syndrome coronavirus 2
  REGION 1..9: note = ORF3a 12-55; Min_EDGE_ORF3a_expl.; Table F
IPIQASLPF

SEQ ID NO: 27846 - protein, 11 aa, Severe acute respiratory syndrome coronavirus 2
  REGION 1..11: note = ORF3a 12-55; Min_EDGE_ORF3a_expl.; Table F
SLPFGWLIVGV

SEQ ID NO: 27847 - protein, 9 aa, Severe acute respiratory syndrome coronavirus 2
  REGION 1..9: note = ORF3a 52-85; Min_EDGE_ORF3a_expl.; Table F
LALSKGVHF

SEQ ID NO: 27848 - protein, 8 aa, Severe acute respiratory syndrome coronavirus 2
  REGION 1..8: note = ORF3a 198-254; Min_EDGE_ORF3a_expl.; Table F
TGVEHVTF

SEQ ID NO: 27849 - protein, 10 aa, Severe acute respiratory syndrome coronavirus 2
  REGION 1..10: note = ORF3a 101-152; Min_EDGE_ORF3a_expl.; Table F
FLQSINFVRI

SEQ ID NO: 27850 - protein, 8 aa, Severe acute respiratory syndrome coronavirus 2
  REGION 1..8: note = ORF3a 101-152; Min_EDGE_ORF3a_expl.; Table F
YFLQSINF

SEQ ID NO: 27851 - protein, 10 aa, Severe acute respiratory syndrome coronavirus 2
  REGION 1..10: note = ORF3a 198-254; Min_EDGE_ORF3a_expl.; Table F
SYFTSDYYQL

SEQ ID NO: 27852 - protein, 10 aa, Severe acute respiratory syndrome coronavirus 2
  REGION 1..10: note = ORF3a 198-254; Min_EDGE_ORF3a_expl.; Table F
KIVDEPEEHV

SEQ ID NO: 27853 - protein, 10 aa, Severe acute respiratory syndrome coronavirus 2
  REGION 1..10: note = ORF3a 198-254; Min_EDGE_ORF3a_expl.; Table F
LHSYFTSDYY

SEQ ID NO: 27854 - protein, 9 aa, Severe acute respiratory syndrome coronavirus 2
  REGION 1..9: note = ORF3a 168-198; Min_EDGE_ORF3a_expl.; Table F
YQIGGYTEK

SEQ ID NO: 27855 - protein, 9 aa, Severe acute respiratory syndrome coronavirus 2
  REGION 1..9: note = ORF3a 12-55; Min_EDGE_ORF3a_expl.; Table F
IQASLPFGW

SEQ ID NO: 27856 - protein, 9 aa, Severe acute respiratory syndrome coronavirus 2
  REGION 1..9: note = ORF3a 12-55; Min_EDGE_ORF3a_expl.; Table F
SDFVRATAT

SEQ ID NO: 27857 - protein, 9 aa, Severe acute respiratory syndrome coronavirus 2
  REGION 1..9: note = ORF3a 52-85; Min_EDGE_ORF3a_expl.; Table F
KIITLKKRW

SEQ ID NO: 27858 - protein, 9 aa, Severe acute respiratory syndrome coronavirus 2
  REGION 1..9: note = ORF3a 101-152; Min_EDGE_ORF3a_expl.; Table F
LQSINFVRI

SEQ ID NO: 27859 - protein, 9 aa, Severe acute respiratory syndrome coronavirus 2
  REGION 1..9: note = ORF3a 12-55; Min_EDGE_ORF3a_expl.; Table F
ASLPFGWLI

SEQ ID NO: 27860 - protein, 8 aa, Severe acute respiratory syndrome coronavirus 2
  REGION 1..8: note = ORF3a 198-254; Min_EDGE_ORF3a_expl.; Table F
YQLYSTQL

SEQ ID NO: 27861 - protein, 9 aa, Severe acute respiratory syndrome coronavirus 2
  REGION 1..9: note = ORF3a 101-152; Min_EDGE_ORF3a_expl.; Table F
CRSKNPLLY

SEQ ID NO: 27862 - protein, 11 aa, Severe acute respiratory syndrome coronavirus 2
  REGION 1..11: note = ORF3a 198-254; Min_EDGE_ORF3a_expl.; Table F
VLHSYFTSDYY

SEQ ID NO: 27863 - protein, 11 aa, Severe acute respiratory syndrome coronavirus 2
  REGION 1..11: note = ORF3a 52-85; Min_EDGE_ORF3a_expl.; Table F
KIITLKKRWQL

SEQ ID NO: 27864 - protein, 9 aa, Severe acute respiratory syndrome coronavirus 2
  REGION 1..9: note = ORF3a 198-254; Min_EDGE_ORF3a_expl.; Table F
EPEEHVQIH

SEQ ID NO: 27865 - protein, 8 aa, Severe acute respiratory syndrome coronavirus 2
  REGION 1..8: note = ORF3a 12-55; Min_EDGE_ORF3a_expl.; Table F
TATIPIQA

SEQ ID NO: 27866 - protein, 9 aa, Severe acute respiratory syndrome coronavirus 2
  REGION 1..9: note = ORF3a 168-198; Min_EDGE_ORF3a_expl.; Table F
PISEHDYQI

SEQ ID NO: 27867 - protein, 10 aa, Severe acute respiratory syndrome coronavirus 2
  REGION 1..10: note = ORF3a 12-55; Min_EDGE_ORF3a_expl.; Table F
RATATIPIQA

SEQ ID NO: 27868 - protein, 8 aa, Severe acute respiratory syndrome coronavirus 2
  REGION 1..8: note = ORF3a 12-55; Min_EDGE_ORF3a_expl.; Table F
SDFVRATA

SEQ ID NO: 27869 - protein, 9 aa, Severe acute respiratory syndrome coronavirus 2
  REGION 1..9: note = ORF3a 198-254; Min_EDGE_ORF3a_expl.; Table F
VEHVTFFIY

SEQ ID NO: 27870 - protein, 9 aa, Severe acute respiratory syndrome coronavirus 2
  REGION 1..9: note = ORF3a 12-55; Min_EDGE_ORF3a_expl.; Table F
IKDATPSDF

SEQ ID NO: 27871 - protein, 9 aa, Severe acute respiratory syndrome coronavirus 2
  REGION 1..9: note = ORF3a 101-152; Min_EDGE_ORF3a_expl.; Table F
YFLQSINFV

SEQ ID NO: 27872 - protein, 8 aa, Severe acute respiratory syndrome coronavirus 2
  REGION 1..8: note = ORF3a 101-152; Min_EDGE_ORF3a_expl.; Table F
QSINFVRI

SEQ ID NO: 27873 - protein, 10 aa, Severe acute respiratory syndrome coronavirus 2
  REGION 1..10: note = ORF3a 101-152; Min_EDGE_ORF3a_expl.; Table F
KNPLLYDANY

SEQ ID NO: 27874 - protein, 8 aa, Severe acute respiratory syndrome coronavirus 2
  REGION 1..8: note = ORF3a 12-55; Min_EDGE_ORF3a_expl.; Table F
GEIKDATP

SEQ ID NO: 27875 - protein, 11 aa, Severe acute respiratory syndrome coronavirus 2
  REGION 1..11: note = ORF3a 12-55; Min_EDGE_ORF3a_expl.; Table F
LPFGWLIVGVA

SEQ ID NO: 27876 - protein, 11 aa, Severe acute respiratory syndrome coronavirus 2
  REGION 1..11: note = ORF3a 168-198; Min_EDGE_ORF3a_expl.; Table F
HDYQIGGYTEK

SEQ ID NO: 27877 - protein, 9 aa, Severe acute respiratory syndrome coronavirus 2
  REGION 1..9: note = ORF3a 12-55; Min_EDGE_ORF3a_expl.; Table F
DFVRATATI

SEQ ID NO: 27878 - protein, 8 aa, Severe acute respiratory syndrome coronavirus 2
  REGION 1..8: note = ORF3a 101-152; Min_EDGE_ORF3a_expl.; Table F
FLQSINFV

SEQ ID NO: 27879 - protein, 11 aa, Severe acute respiratory syndrome coronavirus 2
  REGION 1..11: note = ORF3a 101-152; Min_EDGE_ORF3a_expl.; Table F
YFLQSINFVRI

SEQ ID NO: 27880 - protein, 9 aa, Severe acute respiratory syndrome coronavirus 2
  REGION 1..9: note = ORF3a 198-254; Min_EDGE_ORF3a_expl.; Table F
DTGVEHVTF

SEQ ID NO: 27881 - protein, 9 aa, Severe acute respiratory syndrome coronavirus 2
  REGION 1..9: note = ORF3a 198-254; Min_EDGE_ORF3a_expl.; Table F
QLYSTQLST

SEQ ID NO: 27882 - protein, 8 aa, Severe acute respiratory syndrome coronavirus 2
  REGION 1..8: note = ORF3a 101-152; Min_EDGE_ORF3a_expl.; Table F
SINFVRII

SEQ ID NO: 27883 - protein, 11 aa, Severe acute respiratory syndrome coronavirus 2
  REGION 1..11: note = ORF3a 168-198; Min_EDGE_ORF3a_expl.; Table F
TTSPISEHDYQ

SEQ ID NO: 27884 - protein, 8 aa, Severe acute respiratory syndrome coronavirus 2
  REGION 1..8: note = ORF3a 12-55; Min_EDGE_ORF3a_expl.; Table F
DATPSDFV

SEQ ID NO: 27885 - protein, 8 aa, Severe acute respiratory syndrome coronavirus 2
  REGION 1..8: note = ORF3a 12-55; Min_EDGE_ORF3a_expl.; Table F
FGWLIVGV

SEQ ID NO: 27886 - protein, 9 aa, Severe acute respiratory syndrome coronavirus 2
  REGION 1..9: note = ORF3a 168-198; Min_EDGE_ORF3a_expl.; Table F
GTTSPISEH

SEQ ID NO: 27887 - protein, 11 aa, Severe acute respiratory syndrome coronavirus 2
  REGION 1..11: note = ORF3a 12-55; Min_EDGE_ORF3a_expl.; Table F
TPSDFVRATAT

SEQ ID NO: 27888 - protein, 10 aa, Severe acute respiratory syndrome coronavirus 2
  REGION 1..10: note = ORF3a 198-254; Min_EDGE_ORF3a_expl.; Table F
DYYQLYSTQL

SEQ ID NO: 27889 - protein, 9 aa, Severe acute respiratory syndrome coronavirus 2
  REGION 1..9: note = ORF3a 198-254; Min_EDGE_ORF3a_expl.; Table F
LSTDTGVEH

SEQ ID NO: 27890 - protein, 11 aa, Severe acute respiratory syndrome coronavirus 2
  REGION 1..11: note = ORF3a 198-254; Min_EDGE_ORF3a_expl.; Table F
EHVTFFIYNKI

SEQ ID NO: 27891 - protein, 9 aa, Severe acute respiratory syndrome coronavirus 2
  REGION 1..9: note = ORF3a 12-55; Min_EDGE_ORF3a_expl.; Table F
GEIKDATPS

SEQ ID NO: 27892 - protein, 8 aa, Severe acute respiratory syndrome coronavirus 2
  REGION 1..8: note = ORF3a 12-55; Min_EDGE_ORF3a_expl.; Table F
QASLPFGW

SEQ ID NO: 27893 - protein, 9 aa, Severe acute respiratory syndrome coronavirus 2
  REGION 1..9: note = ORF3a 101-152; Min_EDGE_ORF3a_expl.; Table F
FLYLYALVY

SEQ ID NO: 27894 - protein, 8 aa, Severe acute respiratory syndrome coronavirus 2
  REGION 1..8: note = ORF3a 101-152; Min_EDGE_ORF3a_expl.; Table F
LYLYALVY

SEQ ID NO: 27895 - protein, 9 aa, Severe acute respiratory syndrome coronavirus 2
  REGION 1..9: note = ORF3a 52-85; Min_EDGE_ORF3a_expl.; Table F
WQLALSKGV

SEQ ID NO: 27896 - protein, 8 aa, Severe acute respiratory syndrome coronavirus 2
  REGION 1..8: note = ORF3a 168-198; Min_EDGE_ORF3a_expl.; Table F
SPISEHDY

SEQ ID NO: 27897 - protein, 8 aa, Severe acute respiratory syndrome coronavirus 2
  REGION 1..8: note = ORF3a 168-198; Min_EDGE_ORF3a_expl.; Table F
HDYQIGGY

SEQ ID NO: 27898 - protein, 10 aa, Severe acute respiratory syndrome coronavirus 2
  REGION 1..10: note = ORF3a 12-55; Min_EDGE_ORF3a_expl.; Table F
DATPSDFVRA

SEQ ID NO: 27899 - protein, 11 aa, Severe acute respiratory syndrome coronavirus 2
  REGION 1..11: note = ORF3a 101-152; Min_EDGE_ORF3a_expl.; Table F
QSINFVRIIMR

SEQ ID NO: 27900 - protein, 8 aa, Severe acute respiratory syndrome coronavirus 2
  REGION 1..8: note = ORF3a 101-152; Min_EDGE_ORF3a_expl.; Table F
LYDANYFL

SEQ ID NO: 27901 - protein, 10 aa, Severe acute respiratory syndrome coronavirus 2
  REGION 1..10: note = ORF3a 168-198; Min_EDGE_ORF3a_expl.; Table F
EHDYQIGGYT

SEQ ID NO: 27902 - protein, 10 aa, Severe acute respiratory syndrome coronavirus 2
  REGION 1..10: note = ORF3a 168-198; Min_EDGE_ORF3a_expl.; Table F
DYQIGGYTEK

SEQ ID NO: 27903 - protein, 10 aa, Severe acute respiratory syndrome coronavirus 2
  REGION 1..10: note = ORF3a 198-254; Min_EDGE_ORF3a_expl.; Table F
LSTDTGVEHV

SEQ ID NO: 27904 - protein, 8 aa, Severe acute respiratory syndrome coronavirus 2
  REGION 1..8: note = ORF3a 198-254; Min_EDGE_ORF3a_expl.; Table F
EHVTFFIY

SEQ ID NO: 27905 - protein, 9 aa, Severe acute respiratory syndrome coronavirus 2
  REGION 1..9: note = ORF3a 198-254; Min_EDGE_ORF3a_expl.; Table F
DEPEEHVQI

SEQ ID NO: 27906 - protein, 8 aa, Severe acute respiratory syndrome coronavirus 2
  REGION 1..8: note = ORF3a 52-85; Min_EDGE_ORF3a_expl.; Table F
ASKIITLK

SEQ ID NO: 27907 - protein, 9 aa, Severe acute respiratory syndrome coronavirus 2
  REGION 1..9: note = ORF3a 12-55; Min_EDGE_ORF3a_expl.; Table F
LPFGWLIVG

SEQ ID NO: 27908 - protein, 9 aa, Severe acute respiratory syndrome coronavirus 2
  REGION 1..9: note = ORF3a 168-198; Min_EDGE_ORF3a_expl.; Table F
TSPISEHDY

SEQ ID NO: 27909 - protein, 8 aa, Severe acute respiratory syndrome coronavirus 2
  REGION 1..8: note = ORF3a 198-254; Min_EDGE_ORF3a_expl.; Table F
VTFFIYNK

SEQ ID NO: 27910 - protein, 8 aa, Severe acute respiratory syndrome coronavirus 2
  REGION 1..8: note = ORF3a 12-55; Min_EDGE_ORF3a_expl.; Table F
FVRATATI

SEQ ID NO: 27911 - protein, 9 aa, Severe acute respiratory syndrome coronavirus 2
  REGION 1..9: note = Min_Sette; Table F
LPNNTASWF

SEQ ID NO: 27912 - protein, 13 aa, Severe acute respiratory syndrome coronavirus 2
  REGION 1..13: note = Min_Sette; Table F
NTNSSPDDQIGYY

SEQ ID NO: 27913 - protein, 9 aa, Severe acute respiratory syndrome coronavirus 2
  REGION 1..9: note = Min_Sette; Table F
SPDDQIGYY

SEQ ID NO: 27914 - protein, 9 aa, Severe acute respiratory syndrome coronavirus 2
  REGION 1..9: note = Min_Sette; Table F
GTRNPANNA

SEQ ID NO: 27915 - protein, 9 aa, Severe acute respiratory syndrome coronavirus 2
  REGION 1..9: note = Min_Sette; Table F
KSAAEASKK

SEQ ID NO: 27916 - protein, 9 aa, Severe acute respiratory syndrome coronavirus 2
  REGION 1..9: note = Min_Sette; Table F
KAYNVTQAF

SEQ ID NO: 27917 - protein, 10 aa, Severe acute respiratory syndrome coronavirus 2
  REGION 1..10: note = Min_Sette; Table F
QELIRQGTDY

SEQ ID NO: 27918 - protein, 9 aa, Severe acute respiratory syndrome coronavirus 2
  REGION 1..9: note = Min_Sette; Table F
ELIRQGTDY

SEQ ID NO: 27919 - protein, 10 aa, Severe acute respiratory syndrome coronavirus 2
  REGION 1..10: note = Min_Sette; Table F
QFAPSASAFF

SEQ ID NO: 27920 - protein, 9 aa, Severe acute respiratory syndrome coronavirus 2
  REGION 1..9: note = Min_Sette; Table F
FAPSASAFF

SEQ ID NO: 27921 - protein, 10 aa, Severe acute respiratory syndrome coronavirus 2
  REGION 1..10: note = Min_Sette; Table F
APSASAFFGM

SEQ ID NO: 27922 - protein, 10 aa, Severe acute respiratory syndrome coronavirus 2
  REGION 1..10: note = Min_Sette; Table F
SASAFFGMSR

SEQ ID NO: 27923 - protein, 11 aa, Severe acute respiratory syndrome coronavirus 2
  REGION 1..11: note = Min_Sette; Table F
EVTPSGTWLTY

SEQ ID NO: 27924 - protein, 10 aa, Severe acute respiratory syndrome coronavirus 2
  REGION 1..10: note = Min_Sette; Table F
VTPSGTWLTY

SEQ ID NO: 27925 - protein, 9 aa, Severe acute respiratory syndrome coronavirus 2
  REGION 1..9: note = Min_Sette; Table F
TPSGTWLTY

SEQ ID NO: 27926 - protein, 10 aa, Severe acute respiratory syndrome coronavirus 2
  REGION 1..10: note = Min_Sette; Table F
YKTFPPTEPK

SEQ ID NO: 27927 - protein, 9 aa, Severe acute respiratory syndrome coronavirus 2
  REGION 1..9: note = Min_Sette; Table F
LPAADLDDF

SEQ ID NO: 27928 - protein, 9 aa, Severe acute respiratory syndrome coronavirus 2
  REGION 1..9: note = Min_Sette; Table F
ATIPIQASL

SEQ ID NO: 27929 - protein, 9 aa, Severe acute respiratory syndrome coronavirus 2
  REGION 1..9: note = Min_Sette; Table F
IPIQASLPF

SEQ ID NO: 27930 - protein, 8 aa, Severe acute respiratory syndrome coronavirus 2
  REGION 1..8: note = Min_Sette; Table F
LPFGWLIV

SEQ ID NO: 27931 - protein, 9 aa, Severe acute respiratory syndrome coronavirus 2
  REGION 1..9: note = Min_Sette; Table F
QSASKIITL

SEQ ID NO: 27932 - protein, 12 aa, Severe acute respiratory syndrome coronavirus 2
  REGION 1..12: note = Min_Sette; Table F
SASKIITLKKRW

SEQ ID NO: 27933 - protein, 9 aa, Severe acute respiratory syndrome coronavirus 2
  REGION 1..9: note = Min_Sette; Table F
ITLKKRWQL

SEQ ID NO: 27934 - protein, 9 aa, Severe acute respiratory syndrome coronavirus 2
  REGION 1..9: note = Min_Sette; Table F
LYLYALVYF

SEQ ID NO: 27935 - protein, 9 aa, Severe acute respiratory syndrome coronavirus 2
  REGION 1..9: note = Min_Sette; Table F
FVRIIMRLW

SEQ ID NO: 27936 - protein, 9 aa, Severe acute respiratory syndrome coronavirus 2
  REGION 1..9: note = Min_Sette; Table F
NPLLYDANY

SEQ ID NO: 27937 - protein, 9 aa, Severe acute respiratory syndrome coronavirus 2
  REGION 1..9: note = Min_Sette; Table F
HSYFTSDYY

SEQ ID NO: 27938 - protein, 10 aa, Severe acute respiratory syndrome coronavirus 2
  REGION 1..10: note = Min_Sette; Table F
YFTSDYYQLY

SEQ ID NO: 27939 - protein, 9 aa, Severe acute respiratory syndrome coronavirus 2
  REGION 1..9: note = Min_Sette; Table F
HVTFFIYNK

SEQ ID NO: 27940 - RNA, 80 nt, synthetic construct
  source 1..80: mol_type = other RNA
aaaaaaaaaaaaaaaaaaaaaaaaaaaaaaaaaaaaaaaaaaaaaaaaaaaaaaaaaaaaaaaaaaaaaaaaaaaaaaaa

SEQ ID NO: 27941 - protein, 10 aa, synthetic construct
  SITE 1..10: note = This sequence may encompass 2-10 residues
GGGGGGGGGG

SEQ ID NO: 27942 - protein, 10 aa, synthetic construct
  SITE 1..10: note = This sequence may encompass 2-10 residues
AAAAAAAAAA

SEQ ID NO: 27943 - RNA, 90 nt, synthetic construct
  misc_feature 1..90: note = This sequence may encompass 20-90 nucleotides
  source 1..90: mol_type = other RNA
aaaaaaaaaaaaaaaaaaaaaaaaaaaaaaaaaaaaaaaaaaaaaaaaaaaaaaaaaaaaaaaaaaaaaaaaaaaaaaaaaaaaaaaaaa

SEQ ID NO: 27944 - protein, 23 aa, Severe acute respiratory syndrome coronavirus 2
HIDAYKTFPPTEPKKDKKKKADE

SEQ ID NO: 27945 - protein, 17 aa, Severe acute respiratory syndrome coronavirus 2
CRSKNPLLYDANYFLCW

SEQ ID NO: 27946 - protein, 29 aa, Severe acute respiratory syndrome coronavirus 2
FEYYHTTDPSFLGRYMSALNHTKKWKYPQ

SEQ ID NO: 27947 - protein, 18 aa, Severe acute respiratory syndrome coronavirus 2
ISNEKQEILGTVSWNLRE

SEQ ID NO: 27948 - protein, 44 aa, Severe acute respiratory syndrome coronavirus 2
DIKDLPKEITVATSRTLSYYKLGASQRVAGDSGFAAYSRYRIGN

SEQ ID NO: 27949 - protein, 24 aa, Severe acute respiratory syndrome coronavirus 2
VRATATIPIQASLPFGWLIVGVAL

SEQ ID NO: 27950 - protein, 24 aa, Severe acute respiratory syndrome coronavirus 2
YLTFYLTNDVSFLAHIQWMVMFTP

SEQ ID NO: 27951 - protein, 21 aa, Severe acute respiratory syndrome coronavirus 2
GLMWLSYFIASFRLFARTRSM

SEQ ID NO: 27952 - protein, 19 aa, Severe acute respiratory syndrome coronavirus 2
DWYDFVENPDILRVYANLG

SEQ ID NO: 27953 - protein, 17 aa, Severe acute respiratory syndrome coronavirus 2
PYPNASFDNFKFVCDNI

SEQ ID NO: 27954 - protein, 21 aa, Severe acute respiratory syndrome coronavirus 2
NFNKDFYDFAVSKGFFKEGSS

SEQ ID NO: 27955 - protein, 18 aa, Severe acute respiratory syndrome coronavirus 2
DGVPFVVSTGYHFRELGV

SEQ ID NO: 27956 - protein, 27 aa, Severe acute respiratory syndrome coronavirus 2
ACPLIAAVITREVGFVVPGLPGTILRT

SEQ ID NO: 27957 - protein, 17 aa, Severe acute respiratory syndrome coronavirus 2
ATTRQVVNVVTTKIALK

SEQ ID NO: 27958 - protein, 20 aa, Severe acute respiratory syndrome coronavirus 2
SRIGMEVTPSGTWLTYTGAI

SEQ ID NO: 27959 - protein, 17 aa, Severe acute respiratory syndrome coronavirus 2
TLACFVLAAVYRINWIT

SEQ ID NO: 27960 - protein, 22 aa, Severe acute respiratory syndrome coronavirus 2
GGDGKMKDLSPRWYFYYLGTGP

SEQ ID NO: 27961 - protein, 27 aa, Severe acute respiratory syndrome coronavirus 2
GPLVRKIFVDGVPFVVSTGYHFRELGV

SEQ ID NO: 27962 - protein, 39 aa, Severe acute respiratory syndrome coronavirus 2
PVYSFLPGVYSVIYLYLTFYLTNDVSFLAHIQWMVMFTP

SEQ ID NO: 27963 - protein, 18 aa, Severe acute respiratory syndrome coronavirus 2
NNLDKSAGFPFNKWGKAR

SEQ ID NO: 27964 - protein, 19 aa, Severe acute respiratory syndrome coronavirus 2
TLACFVLAAVYRINWITGG

SEQ ID NO: 27965 - protein, 17 aa, Severe acute respiratory syndrome coronavirus 2
TYNKVENMTPRDLGACI

SEQ ID NO: 27966 - protein, 22 aa, Severe acute respiratory syndrome coronavirus 2
KQGDDYVYLPYPDPSRILGAGC

SEQ ID NO: 27967 - protein, 26 aa, Severe acute respiratory syndrome coronavirus 2
SLATVAYFNMVYMPASWVMRIMTWLD

SEQ ID NO: 27968 - protein, 17 aa, Severe acute respiratory syndrome coronavirus 2
GNCDTLKEILVTYNCCD

SEQ ID NO: 27969 - protein, 31 aa, Severe acute respiratory syndrome coronavirus 2
EAFEYYHTTDPSFLGRYMSALNHTKKWKYPQ

SEQ ID NO: 27970 - protein, 37 aa, Severe acute respiratory syndrome coronavirus 2
WPQIAQFAPSASAFFGMSRIGMEVTPSGTWLTYTGAI

SEQ ID NO: 27971 - protein, 60 aa, Severe acute respiratory syndrome coronavirus 2
ACPLIAAVITREVGFVVPGLPGTILRTTNGDFLHFLPRVFSAVGNICYTPSKLIEYTDFA

SEQ ID NO: 27972 - protein, 31 aa, Severe acute respiratory syndrome coronavirus 2
NVAFQTVKPGNFNKDFYDFAVSKGFFKEGSS

SEQ ID NO: 27973 - protein, 22 aa, Severe acute respiratory syndrome coronavirus 2
GASQRVAGDSGFAAYSRYRIGN

SEQ ID NO: 27974 - protein, 1270 aa, synthetic construct
MFVFLVLLPLVSSQCVNLTTRTQLPPAYTNSFTRGVYYPDKVFRSSVLHSTQDLFLPFFSNVTWFHVISGTNGTKRFDNPVLPFNDGVYFASIEKSNIIRGWIFGTTLDSKTQSLLIVNNATNVVIKVCEFQFCNDPFLDHKNNKSWMESEFRVYSSANNCTFEYVSQPFLMDLEGKQGNFKNLREFVFKNIDGYFKIYSKHTPIIVREPEDLPQGFSALEPLVDLPIGINITRFQTLLALHRSYLTPGDSSSGWTAGAAAYYVGYLQPRTFLLKYNENGTITDAVDCALDPLSETKCTLKSFTVEKGIYQTSNFRVQPTESIVRFPNITNLCPFDEVFNATRFASVYAWNRKRISNCVADYSVLYNLAPFFTFKCYGVSPTKLNDLCFTNVYADSFVIRGDEVRQIAPGQTGNIADYNYKLPDDFTGCVIAWNSNKLDSKVSGNYNYLYRLFRKSNLKPFERDISTEIYQAGNKPCNGVAGFNCYFPLKSYSFRPTYGVGHQPYRVVVLSFELLHAPATVCGPKKSTNLVKNKCVNFNFNGLKGTGVLTESNKKFLPFQQFGRDIADTTDAVRDPQTLEILDITPCSFGGVSVITPGTNTSNQVAVLYQGVNCTEVPVAIHADQLTPTWRVYSTGSNVFQTRAGCLIGAEYVNNSYECDIPIGAGICASYQTQTKSHGSASSVASQSIIAYTMSLGAENSVAYSNNSIAIPTNFTISVTTEILPVSMTKTSVDCTMYICGDSTECSNLLLQYGSFCTQLKRALTGIAVEQDKNTQEVFAQVKQIYKTPPIKYFGGFNFSQILPDPSKPSKRSFIEDLLFNKVTLADAGFIKQYGDCLGDIAARDLICAQKFKGLTVLPPLLTDEMIAQYTSALLAGTITSGWTFGAGAALQIPFAMQMAYRFNGIGVTQNVLYENQKLIANQFNSAIGKIQDSLSSTASALGKLQDVVNHNAQALNTLVKQLSSKFGAISSVLNDIFSRLDPPEAEVQIDRLITGRLQSLQTYVTQQLIRAAEIRASANLAATKMSECVLGQSKRVDFCGKGYHLMSFPQSAPHGVVFLHVTYVPAQEKNFTTAPAICHDGKAHFPREGVFVSNGTHWFVTQRNFYEPQIITTDNTFVSGNCDVVIGIVNNTVYDPLQPELDSFKEELDKYFKNHTSPDVDLGDISGINASVVNIQKEIDRLNEVAKNLNESLIDLQELGKYEQYIKWPWYIWLGFIAGLIAIVMVTIMLCCMTSCCSCLKGCCSCGSCCKFDEDDSEPVLKGVKLHYT

SEQ ID NO: 27975 - protein, 243 aa, synthetic construct
MAGNVAFQTVKPGNFNKDFYDFAVSKGFFKEGSSGASQRVAGDSGFAAYSRYRIGNDGVPFVVSTGYHFRELGVYLTFYLTNDVSFLAHIQWMVMFTPGLMWLSYFIASFRLFARTRSMFEYYHTTDPSFLGRYMSALNHTKKWKYPQISNEKQEILGTVSWNLREATTRQVVNVVTTKIALKTLACFVLAAVYRINWITGPGPGAKFVAAWTLKAAAGPGPGQYIKANSKFIGITELGPGPG

SEQ ID NO: 27976 - DNA, 13932 bp, synthetic construct
  source 1..13932: mol_type = other DNA
atgggcggcgcatgagagaagcccagaccaattacctacccaaaatggagaaagttcacgttgacatcgaggaagacagcccattcctcagagctttgcagcggagcttcccgcagtttgaggtagaagccaagcaggtcactgataatgaccatgctaatgccagagcgttttcgcatctggcttcaaaactgatcgaaacggaggtggacccatccgacacgatccttgacattggaagtgcgcccgcccgcagaatgtattctaagcacaagtatcattgtatctgtccgatgagatgtgcggaagatccggacagattgtataagtatgcaactaagctgaagaaaaactgtaaggaaataactgataaggaattggacaagaaaatgaaggagctcgccgccgtcatgagcgaccctgacctggaaactgagactatgtgcctccacgacgacgagtcgtgtcgctacgaagggcaagtcgctgtttaccaggatgtatacgcggttgacggaccgacaagtctctatcaccaagccaataagggagttagagtcgcctactggataggctttgacaccaccccttttatgtttaagaacttggctggagcatatccatcatactctaccaactgggccgacgaaaccgtgttaacggctcgtaacataggcctatgcagctctgacgttatggagcggtcacgtagagggatgtccattcttagaaagaagtatttgaaaccatccaacaatgttctattctctgttggctcgaccatctaccacgagaagagggacttactgaggagctggcacctgccgtctgtatttcacttacgtggcaagcaaaattacacatgtcggtgtgagactatagttagttgcgacgggtacgtcgttaaaagaatagctatcagtccaggcctgtatgggaagccttcaggctatgctgctacgatgcaccgcgagggattcttgtgctgcaaagtgacagacacattgaacggggagagggtctcttttcccgtgtgcacgtatgtgccagctacattgtgtgaccaaatgactggcatactggcaacagatgtcagtgcggacgacgcgcaaaaactgctggttgggctcaaccagcgtatagtcgtcaacggtcgcacccagagaaacaccaataccatgaaaaattaccttttgcccgtagtggcccaggcatttgctaggtgggcaaaggaatataaggaagatcaagaagatgaaaggccactaggactacgagatagacagttagtcatggggtgttgttgggcttttagaaggcacaagataacatctatttataagcgcccggatacccaaaccatcatcaaagtgaacagcgatttccactcattcgtgctgcccaggataggcagtaacacattggagatcgggctgagaacaagaatcaggaaaatgttagaggagcacaaggagccgtcacctctcattaccgccgaggacgtacaagaagctaagtgcgcagccgatgaggctaaggaggtgcgtgaagccgaggagttgcgcgcagctctaccacctttggcagctgatgttgaggagcccactctggaagccgatgtcgacttgatgttacaagaggctggggccggctcagtggagacacctcgtggcttgataaaggttaccagctacgctggcgaggacaagatcggctcttacgctgtgctttctccgcaggctgtactcaagagtgaaaaattatcttgcatccaccctctcgctgaacaagtcatagtgataacacactctggccgaaaagggcgttatgccgtggaaccataccatggtaaagtagtggtgccagagggacatgcaatacccgtccaggactttcaagctctgagtgaaagtgccaccattgtgtacaacgaacgtgagttcgtaaacaggtacctgcaccatattgccacacatggaggagcgctgaacactgatgaagaatattacaaaactgtcaagcccagcgagcacgacggcgaatacctgtacgacatcgacaggaaacagtgcgtcaagaaagaactagtcactgggctagggctcacaggcgagctggtggatcctcccttccatgaattcgcctacgagagtctgagaacacgaccagccgctccttaccaagtaccaaccataggggtgtatggcgtgccaggatcaggcaagtctggcatcattaaaagcgcagtcaccaaaaaagatctagtggtgagcgccaagaaagaaaactgtgcagaaattataagggacgtcaagaaaatgaaagggctggacgtcaatgccagaactgtggactcagtgctcttgaatggatgcaaacaccccgtagagaccctgtatattgacgaagcttttgcttgtcatgcaggtactctcagagcgctcatagccattataagacctaaaaaggcagtgctctgcggggatcccaaacagtgcggtttttttaacatgatgtgcctgaaagtgcattttaaccacgagatttgcacacaagtcttccacaaaagcatctctcgccgttgcactaaatctgtgacttcggtcgtctcaaccttgttttacgacaaaaaaatgagaacgacgaatccgaaagagactaagattgtgattgacactaccggcagtaccaaacctaagcaggacgatctcattctcacttgtttcagagggtgggtgaagcagttgcaaatagattacaaaggcaacgaaataatgacggcagctgcctctcaagggctgacccgtaaaggtgtgtatgccgttcggtacaaggtgaatgaaaatcctctgtacgcacccacctcagaacatgtgaacgtcctactgacccgcacggaggaccgcatcgtgtggaaaacactagccggcgacccatggataaaaacactgactgccaagtaccctgggaatttcactgccacgatagaggagtggcaagcagagcatgatgccatcatgaggcacatcttggagagaccggaccctaccgacgtcttccagaataaggcaaacgtgtgttgggccaaggctttagtgccggtgctgaagaccgctggcatagacatgaccactgaacaatggaacactgtggattattttgaaacggacaaagctcactcagcagagatagtattgaaccaactatgcgtgaggttctttggactcgatctggactccggtctattttctgcacccactgttccgttatccattaggaataatcactgggataactccccgtcgcctaacatgtacgggctgaataaagaagtggtccgtcagctctctcgcaggtacccacaactgcctcgggcagttgccactggaagagtctatgacatgaacactggtacactgcgcaattatgatccgcgcataaacctagtacctgtaaacagaagactgcctcatgctttagtcctccaccataatgaacacccacagagtgacttttcttcattcgtcagcaaattgaagggcagaactgtcctggtggtcggggaaaagttgtccgtcccaggcaaaatggttgactggttgtcagaccggcctgaggctaccttcagagctcggctggatttaggcatcccaggtgatgtgcccaaatatgacataatatttgttaatgtgaggaccccatataaataccatcactatcagcagtgtgaagaccatgccattaagcttagcatgttgaccaagaaagcttgtctgcatctgaatcccggcggaacctgtgtcagcataggttatggttacgctgacagggccagcgaaagcatcattggtgctatagcgcggcagttcaagttttcccgggtatgcaaaccgaaatcctcacttgaagagacggaagttctgtttgtattcattgggtacgatcgcaaggcccgtacgcacaatccttacaagctttcatcaaccttgaccaacatttatacaggttccagactccacgaagccggatgtgcaccctcatatcatgtggtgcgaggggatattgccacggccaccgaaggagtgattataaatgctgctaacagcaaaggacaacctggcggaggggtgtgcggagcgctgtataagaaattcccggaaagcttcgatttacagccgatcgaagtaggaaaagcgcgactggtcaaaggtgcagctaaacatatcattcatgccgtaggaccaaacttcaacaaagtttcggaggttgaaggtgacaaacagttggcagaggcttatgagtccatcgctaagattgtcaacgataacaattacaagtcagtagcgattccactgttgtccaccggcatcttttccgggaacaaagatcgactaacccaatcattgaaccatttgctgacagctttagacaccactgatgcagatgtagccatatactgcagggacaagaaatgggaaatgactctcaaggaagcagtggctaggagagaagcagtggaggagatatgcatatccgacgactcttcagtgacagaacctgatgcagagctggtgagggtgcatccgaagagttctttggctggaaggaagggctacagcacaagcgatggcaaaactttctcatatttggaagggaccaagtttcaccaggcggccaaggatatagcagaaattaatgccatgtggcccgttgcaacggaggccaatgagcaggtatgcatgtatatcctcggagaaagcatgagcagtattaggtcgaaatgccccgtcgaagagtcggaagcctccacaccacctagcacgctgccttgcttgtgcatccatgccatgactccagaaagagtacagcgcctaaaagcctcacgtccagaacaaattactgtgtgctcatcctttccattgccgaagtatagaatcactggtgtgcagaagatccaatgctcccagcctatattgttctcaccgaaagtgcctgcgtatattcatccaaggaagtatctcgtggaaacaccaccggtagacgagactccggagccatcggcagagaaccaatccacagaggggacacctgaacaaccaccacttataaccgaggatgagaccaggactagaacgcctgagccgatcatcatcgaagaggaagaagaggatagcataagtttgctgtcagatggcccgacccaccaggtgctgcaagtcgaggcagacattcacgggccgccctctgtatctagctcatcctggtccattcctcatgcatccgactttgatgtggacagtttatccatacttgacaccctggagggagctagcgtgaccagcggggcaacgtcagccgagactaactcttacttcgcaaagagtatggagtttctggcgcgaccggtgcctgcgcctcgaacagtattcaggaaccctccacatcccgctccgcgcacaagaacaccgtcacttgcacccagcagggcctgctcgagaaccagcctagtttccaccccgccaggcgtgaatagggtgatcactagagaggagctcgaggcgcttaccccgtcacgcactcctagcaggtcggtctcgagaaccagcctggtctccaacccgccaggcgtaaatagggtgattacaagagaggagtttgaggcgttcgtagcacaacaacaatgacggtttgatgcgggtgcatacatcttttcctccgacaccggtcaagggcatttacaacaaaaatcagtaaggcaaacggtgctatccgaagtggtgttggagaggaccgaattggagatttcgtatgccccgcgcctcgaccaagaaaaagaagaattactacgcaagaaattacagttaaatcccacacctgctaacagaagcagataccagtccaggaaggtggagaacatgaaagccataacagctagacgtattctgcaaggcctagggcattatttgaaggcagaaggaaaagtggagtgctaccgaaccctgcatcctgttcctttgtattcatctagtgtgaaccgtgccttttcaagccccaaggtcgcagtggaagcctgtaacgccatgttgaaagagaactttccgactgtggcttcttactgtattattccagagtacgatgcctatttggacatggttgacggagcttcatgctgcttagacactgccagtttttgccctgcaaagctgcgcagctttccaaagaaacactcctatttggaacccacaatacgatcggcagtgccttcagcgatccagaacacgctccagaacgtcctggcagctgccacaaaaagaaattgcaatgtcacgcaaatgagagaattgcccgtattggattcggcggcctttaatgtggaatgcttcaagaaatatgcgtgtaataatgaatattgggaaacgtttaaagaaaaccccatcaggcttactgaagaaaacgtggtaaattacattaccaaattaaaaggaccaaaagctgctgctctttttgcgaagacacataatttgaatatgttgcaggacataccaatggacaggtttgtaatggacttaaagagagacgtgaaagtgactccaggaacaaaacatactgaagaacggcccaaggtacaggtgatccaggctgccgatccgctagcaacagcgtatctgtgcggaatccaccgagagctggttaggagattaaatgcggtcctgcttccgaacattcatacactgtttgatatgtcggctgaagactttgacgctattatagccgagcacttccagcctggggattgtgttctggaaactgacatcgcgtcgtttgataaaagtgaggacgacgccatggctctgaccgcgttaatgattctggaagacttaggtgtggacgcagagctgttgacgctgattgaggcggctttcggcgaaatttcatcaatacatttgcccactaaaactaaatttaaattcggagccatgatgaaatctggaatgttcctcacactgtttgtgaacacagtcattaacattgtaatcgcaagcagagtgttgagagaacggctaaccggatcaccatgtgcagcattcattggagatgacaatatcgtgaaaggagtcaaatcggacaaattaatggcagacaggtgcgccacctggttgaatatggaagtcaagattatagatgctgtggtgggcgagaaagcgccttatttctgtggagggtttattttgtgtgactccgtgaccggcacagcgtgccgtgtggcagaccccctaaaaaggctgtttaagcttggcaaacctctggcagcagacgatgaacatgatgatgacaggagaagggcattgcatgaagagtcaacacgctggaaccgagtgggtattctttcagagctgtgcaaggcagtagaatcaaggtatgaaaccgtaggaacttccatcatagttatggccatgactactctagctagcagtgttaaatcattcagctacctgagaggggcccctataactctctacggctaacctgaatggactacgactctagaatagtctttaattaagccaccatgtcagataatgggcctcagaaccagcggaatgcccccaggatcacgttcggtgggccttcagattcaactggaagcaatcagaacggggaaagatccggtgcaaggtccaagcaacgccgaccccagggattgcctaataatacagcaagttggtttactgcactgacccaacacgggaaagaggaccttaaatttccgcgggggcaaggagtacctataaacactaatagcagccccgatgaccaaattgggtactaccgcagagcaacccggcgaatcagagggggtgacggtaagatgaaggacctctcccccaggtggtacttctactatttgggaacggggccagaagccggactgccctacggcgcaaacaaagacggtataatatgggtcgccactgagggcgctctgaatacgccaaaagatcacattggtactagaaacccggcgaacaatgcggcaattgtgcttcagctccctcaaggaacaacgttgccaaaaggattttacgcagagggatcacgggggggttcccaggctagttctcgcagttcctcaaggagtcgaaattccagtaggaactcaaccccaggctcaagccgcgggacttcacctgcaagaatggccggtaacgggggagacgctgctttggctcttcttctccttgatcgccttaatcagcttgagtctaagatgtctggtaaaggccaacagcaacaaggacagacggtaacgaaaaaatccgccgccgaggcctctaaaaaaccgagacaaaaacggactgctacgaaagcgtataacgtcactcaggcttttggtaggcggggcccggaacaaacccagggtaattttggcgatcaggaactgattagacaaggcaccgactacaagcactggcctcagatcgcgcagtttgcaccctccgcttcagcgttcttcgggatgtcacgcatcgggatggaggttacaccgagtggaacatggctgacatatactggtgcaatcaagctggacgacaaggatcccaacttcaaagatcaagttatactcctcaacaaacatatcgatgcgtataagacattccccccgacggaacccaaaaaagataaaaaaaagaaggccgacgagacccaagccctcccacaacgacaaaagaaacaacaaacagtaacactgctcccagccgcagacttggatgatttctccaaacagttgcagcaatctatgagttcagccgatagtactcaggccggcggttctggaggtgtccgtgctgaaggacgcgggtcccttctcacctgcggcgacgttgaggaaaaccctggccctatggctggcaacgtagctttccagaccgtgaagccgggaaatttcaacaaggacttctacgacttcgccgtcagcaagggattctttaaagaaggaagctccggtgccagtcagagagtcgccggcgactcaggctttgccgcgtatagccgatatcggattggcaatgacggtgtcccgttcgtggtctcgaccggatatcacttccgtgaactaggggtatatctgaccttctacttgacgaacgacgtgtcgttcctagcgcatattcaatggatggtcatgttcacgccaggcttaatgtggctgtcttatttcatcgcctcttttagactgttcgctaggacaaggagcatgtttgagtattaccacactactgaccccagttttctaggacgctacatgagtgctttgaatcataccaagaagtggaaatacccacagatttccaatgagaagcaggagatccttggaacagttagttggaatttgagggaagccacgacgagacaggttgtgaacgtggttacgacaaaaatcgcactgaagacactagcctgcttcgtgctggccgccgtttaccgcatcaattggattaccggacccggaccaggcgccaaatttgttgctgcttggacactgaaagctgctgctgggcccggaccaggccagtacatcaaggccaactctaagtttatcggcatcaccgaattgggacctggacccggctagtgattcgaagggcccctataactctctacggctaacctgaatggactacgacatagtctagtccgccaaggccaccatgtttgtcttcctggtcttgctgccgctggtgagcagccagtgcgtgaatctcaccacccgcacccagcttccacctgcctacactaacagcttcacccgaggggtgtattaccctgacaaggtattccggtcctccgtcctccatagcacgcaggacctttttctgcccttcttctcaaatgtgacatggttccatgtgattagcggcacgaatggaacgaagcgctttgataaccccgtgctgcctttcaatgacggcgtctacttcgcctccattgaaaagtcaaacatcatccggggctggatctttggcaccactcttgattcaaagacccagtcactgctgattgtgaacaatgctacaaacgtggttatcaaggtgtgtgagtttcagttctgtaacgatccatttttggaccacaagaacaacaagtcctggatggagtctgagttcagagtgtatagctctgctaacaactgcaccttcgagtacgtgtcccagcctttccttatggacctggaaggcaaacagggcaatttcaaaaacctgagagagttcgtgtttaagaacattgacggatacttcaaaatttattctaagcacacaccaattattgtgcgggagccagaggacctaccccaaggctttagcgccctagagcccctggttgacctgcccattgggatcaatataacaaggttccaaactctactggctctgcatagaagttatctgaccccaggagacagctctagtggttggaccgccggcgcagcagcctactatgtcgggtacttacagccacgcacgttccttctgaagtacaatgagaacgggacaatcactgacgcagtagactgtgcactggacccgctaagcgagactaagtgcacacttaaatccttcacggtggagaaaggcatttatcagacctctaacttcagggtgcagccaacagaaagcattgtgcgattcccaaatattactaatctttgccctttcgacgaggtctttaatgcaactagattcgcatcagtctatgcgtggaaccgcaaacgcatttccaattgtgtcgcagactactcagtgctgtacaacctggcccctttctttacgttcaagtgttacggagtgtcacccactaaactgaacgacctgtgctttacaaatgtctacgctgactccttcgtgattaggggagacgaggtgagacaaattgcccccggacagactgggaacattgccgactacaattataagcttcctgatgatttcactggctgtgttattgcctggaatagtaacaagctggatagcaaggtgagcggcaactataactacttatatcgactgtttaggaagagtaatctgaaaccatttgagcgggatatttccacagaaatttaccaggccgggaacaaaccatgtaatggggtggccggatttaattgttacttcccactcaagagctatagtttccgacccacctatggagtgggtcaccagccctatagagtcgtggtgcttagttttgagctgcttcacgccccagcaaccgtctgcggtcccaaaaagtcgaccaatctcgtgaaaaacaaatgcgtaaacttcaactttaacggcttaaaaggaaccggcgtgctcaccgaaagcaacaagaaattccttccatttcagcaattcggaagggacatcgccgacacaacagacgcggtgagggacccacagactctggagatactggacatcactccttgttcgtttgggggcgtctcggtcatcacacccgggactaatactagtaatcaggtagcagttttatatcaaggcgtcaactgtaccgaagtacctgtggccatacacgctgatcagctaacgccaacatggcgagtctattccaccggctctaacgtttttcagaccagggctgggtgcctgataggggcagagtatgtcaataattcctatgagtgtgatatccccataggtgcggggatctgtgccagctatcaaacccaaaccaaatcacacgggagcgcaagctctgtggcttctcagagcataattgcatatacaatgtcactgggcgctgagaatagcgttgcatactctaataacagcatagccattcccacgaactttactatcagtgtgacaaccgaaatattgccagtttcgatgaccaaaactagcgtggattgcacgatgtacatctgtggagactctaccgaatgcagcaatctgctattacaatatggcagcttctgtacacagttaaagcgagccttgacaggcatcgcagtggaacaggacaaaaatactcaagaggtgtttgcacaggtgaagcaaatctacaaaacgccccccattaaatattttggcgggttcaatttttcacaaattctccccgacccgtctaagccgagtaagcggtccttcatcgaagatctgctctttaacaaagtaaccctcgccgatgccggctttattaagcagtatggcgactgcctgggggatatagccgctcgtgacctgatttgcgcccagaagttcaaaggtctgaccgtgttgcctcctttattgaccgatgaaatgattgcccagtacactagtgccctgctggccggcactatcacgtctgggtggaccttcggagctggtgccgccttgcagataccttttgcaatgcagatggcctataggtttaatggtatcggagtgactcagaacgtactgtacgagaaccagaagctcatcgctaatcaatttaactccgctatcggaaaaatccaggacagcctctcttctacagctagcgctctgggcaaactgcaggatgtcgttaatcataatgcccaggccctgaacaccttggttaaacaactatcttccaaattcggggccatatccagtgtgttgaatgatattttctcccgcttggatccacctgaagctgaggtgcagatcgatcgcttgatcaccggcagactgcagtccctccagacatatgtaactcagcagctgattagagccgccgagataagggcaagtgcgaatctggctgccaccaagatgagcgaatgtgtattgggccagagcaaacgagttgatttttgcggtaaggggtatcatttaatgtctttccctcaatccgcacctcatggcgtagttttcctgcatgtgacttatgtcccggctcaggagaagaattttaccacagcccccgcgatctgccatgacggaaaggcccacttcccccgggaaggcgtgtttgtatccaatgggactcactggtttgtcactcagcgaaatttttatgaaccacagatcatcaccactgacaacacatttgttagtggaaactgcgatgtggtcatcggcatcgtgaataacactgtctatgatccactgcaacctgaactggattcttttaaagaggaactcgacaagtattttaaaaaccacactagccctgacgtggatctcggtgacatttctggcatcaacgctagcgtagtgaacattcagaaagagatagatagacttaatgaggtggccaagaacctcaacgaaagtctgatcgacctccaggaactggggaaatacgagcagtacattaaatggccttggtacatatggctggggttcattgctgggctgatcgcaatagtgatggtgaccataatgctctgttgcatgactagctgctgcagctgcctgaagggctgctgtagttgtgggtcatgttgtaagtttgacgaagatgatagcgagcctgtccttaaaggagtgaagctccactacacctagtaattcgaacggccgtatcacgcccaaacatttacagccgcggtgtcaaaaaccgcgtggacgtggttaacatccctgctgggaggatcagccgtaattattataattggcttggtgctggctactattgtggccatgtacgtgctgaccaaccagaaacataattgaatacagcagcaattggcaagctgcttacatagaactcgcggcgattggcatgccgccttaaaatttttattttattttttcttttcttttccgaatcggattttgtttttaatatttcaaaaaaaaaaaaaaaaaaaaaaaaaaaaaaaaaaaaaaaaaaaaaaaaaaaaaaaaaaaaaaaaaaaaaaaaaaaaaaaaaaaaaaaaaaaaaaaaaaaaaaaaaaaaaaaaaaaaaaaa

SEQ ID NO: 27977 - protein, 1270 aa, synthetic construct
MFVFLVLLPLVSSQCVNLTTRTQLPPAYTNSFTRGVYYPDKVFRSSVLHSTQDLFLPFFSNVTWFHVISGTNGTKRFDNPVLPFNDGVYFASIEKSNIIRGWIFGTTLDSKTQSLLIVNNATNVVIKVCEFQFCNDPFLDHKNNKSWMESEFRVYSSANNCTFEYVSQPFLMDLEGKQGNFKNLREFVFKNIDGYFKIYSKHTPIIVREPEDLPQGFSALEPLVDLPIGINITRFQTLLALHRSYLTPGDSSSGWTAGAAAYYVGYLQPRTFLLKYNENGTITDAVDCALDPLSETKCTLKSFTVEKGIYQTSNFRVQPTESIVRFPNITNLCPFDEVFNATRFASVYAWNRKRISNCVADYSVLYNLAPFFTFKCYGVSPTKLNDLCFTNVYADSFVIRGDEVRQIAPGQTGNIADYNYKLPDDFTGCVIAWNSNKLDSKVSGNYNYLYRLFRKSNLKPFERDISTEIYQAGNKPCNGVAGFNCYFPLKSYSFRPTYGVGHQPYRVVVLSFELLHAPATVCGPKKSTNLVKNKCVNFNFNGLKGTGVLTESNKKFLPFQQFGRDIADTTDAVRDPQTLEILDITPCSFGGVSVITPGTNTSNQVAVLYQGVNCTEVPVAIHADQLTPTWRVYSTGSNVFQTRAGCLIGAEYVNNSYECDIPIGAGICASYQTQTKSHRRARSVASQSIIAYTMSLGAENSVAYSNNSIAIPTNFTISVTTEILPVSMTKTSVDCTMYICGDSTECSNLLLQYGSFCTQLKRALTGIAVEQDKNTQEVFAQVKQIYKTPPIKYFGGFNFSQILPDPSKPSKRSFIEDLLFNKVTLADAGFIKQYGDCLGDIAARDLICAQKFKGLTVLPPLLTDEMIAQYTSALLAGTITSGWTFGAGAALQIPFAMQMAYRFNGIGVTQNVLYENQKLIANQFNSAIGKIQDSLSSTASALGKLQDVVNHNAQALNTLVKQLSSKFGAISSVLNDIFSRLDKVEAEVQIDRLITGRLQSLQTYVTQQLIRAAEIRASANLAATKMSECVLGQSKRVDFCGKGYHLMSFPQSAPHGVVFLHVTYVPAQEKNFTTAPAICHDGKAHFPREGVFVSNGTHWFVTQRNFYEPQIITTDNTFVSGNCDVVIGIVNNTVYDPLQPELDSFKEELDKYFKNHTSPDVDLGDISGINASVVNIQKEIDRLNEVAKNLNESLIDLQELGKYEQYIKWPWYIWLGFIAGLIAIVMVTIMLCCMTSCCSCLKGCCSCGSCCKFDEDDSEPVLKGVKLHYT

SEQ ID NO: 27978 - protein, 1268 aa, synthetic construct
MFVFLVLLPLVSSQCVNLITRTQSYTNSFTRGVYYPDKVFRSSVLHSTQDLFLPFFSNVTWFHAISGTNGTKRFDNPVLPFNDGVYFASTEKSNIIRGWIFGTTLDSKTQSLLIVNNATNVVIKVCEFQFCNDPFLDVYYHKNNKSWMESEFRVYSSANNCTFEYVSQPFLMDLEGKQGNFKNLREFVFKNIDGYFKIYSKHTPINLGRDLPQGFSALEPLVDLPIGINITRFQTLLALHRSYLTPGDSSSGWTAGAAAYYVGYLQPRTFLLKYNENGTITDAVDCALDPLSETKCTLKSFTVEKGIYQTSNFRVQPTESIVRFPNITNLCPFDEVFNATRFASVYAWNRKRISNCVADYSVLYNFAPFFAFKCYGVSPTKLNDLCFTNVYADSFVIRGNEVSQIAPGQTGNIADYNYKLPDDFTGCVIAWNSNKLDSKVGGNYNYRYRLFRKSNLKPFERDISTEIYQAGNKPCNGVAGVNCYFPLQSYGFRPTYGVGHQPYRVVVLSFELLHAPATVCGPKKSTNLVKNKCVNFNFNGLTGTGVLTESNKKFLPFQQFGRDIADTTDAVRDPQTLEILDITPCSFGGVSVITPGTNTSNQVAVLYQGVNCTEVPVAIHADQLTPTWRVYSTGSNVFQTRAGCLIGAEYVNNSYECDIPIGAGICASYQTQTKSHGSASSVASQSIIAYTMSLGAENSVAYSNNSIAIPTNFTISVTTEILPVSMTKTSVDCTMYICGDSTECSNLLLQYGSFCTQLKRALTGIAVEQDKNTQEVFAQVKQIYKTPPIKYFGGFNFSQILPDPSKPSKRSFIEDLLFNKVTLADAGFIKQYGDCLGDIAARDLICAQKFNGLTVLPPLLTDEMIAQYTSALLAGTITSGWTFGAGAALQIPFAMQMAYRFNGIGVTQNVLYENQKLIANQFNSAIGKIQDSLSSTASALGKLQDVVNHNAQALNTLVKQLSSKFGAISSVLNDILSRLDPPEAEVQIDRLITGRLQSLQTYVTQQLIRAAEIRASANLAATKMSECVLGQSKRVDFCGKGYHLMSFPQSAPHGVVFLHVTYVPAQEKNFTTAPAICHDGKAHFPREGVFVSNGTHWFVTQRNFYEPQIITTDNTFVSGNCDVVIGIVNNTVYDPLQPELDSFKEELDKYFKNHTSPDVDLGDISGINASVVNIQKEIDRLNEVAKNLNESLIDLQELGKYEQYIKWPWYIWLGFIAGLIAIVMVTIMLCCMTSCCSCLKGCCSCGSCCKFDEDDSEPVLKGVKLHYT

SEQ ID NO: 27979 - protein, 1268 aa, synthetic construct
MFVFLVLLPLVSSQCVNLITRTQSYTNSFTRGVYYPDKVFRSSVLHSTQDLFLPFFSNVTWFHAISGTNGTKRFDNPVLPFNDGVYFASTEKSNIIRGWIFGTTLDSKTQSLLIVNNATNVVIKVCEFQFCNDPFLDVYYHKNNKSWMESEFRVYSSANNCTFEYVSQPFLMDLEGKQGNFKNLREFVFKNIDGYFKIYSKHTPINLGRDLPQGFSALEPLVDLPIGINITRFQTLLALHRSYLTPGDSSSGWTAGAAAYYVGYLQPRTFLLKYNENGTITDAVDCALDPLSETKCTLKSFTVEKGIYQTSNFRVQPTESIVRFPNITNLCPFDEVFNATRFASVYAWNRKRISNCVADYSVLYNFAPFFAFKCYGVSPTKLNDLCFTNVYADSFVIRGNEVSQIAPGQTGNIADYNYKLPDDFTGCVIAWNSNKLDSKVGGNYNYRYRLFRKSNLKPFERDISTEIYQAGNKPCNGVAGVNCYFPLQSYGFRPTYGVGHQPYRVVVLSFELLHAPATVCGPKKSTNLVKNKCVNFNFNGLTGTGVLTESNKKFLPFQQFGRDIADTTDAVRDPQTLEILDITPCSFGGVSVITPGTNTSNQVAVLYQGVNCTEVPVAIHADQLTPTWRVYSTGSNVFQTRAGCLIGAEYVNNSYECDIPIGAGICASYQTQTKSHRRARSVASQSIIAYTMSLGAENSVAYSNNSIAIPTNFTISVTTEILPVSMTKTSVDCTMYICGDSTECSNLLLQYGSFCTQLKRALTGIAVEQDKNTQEVFAQVKQIYKTPPIKYFGGFNFSQILPDPSKPSKRSFIEDLLFNKVTLADAGFIKQYGDCLGDIAARDLICAQKFNGLTVLPPLLTDEMIAQYTSALLAGTITSGWTFGAGAALQIPFAMQMAYRFNGIGVTQNVLYENQKLIANQFNSAIGKIQDSLSSTASALGKLQDVVNHNAQALNTLVKQLSSKFGAISSVLNDILSRLDKVEAEVQIDRLITGRLQSLQTYVTQQLIRAAEIRASANLAATKMSECVLGQSKRVDFCGKGYHLMSFPQSAPHGVVFLHVTYVPAQEKNFTTAPAICHDGKAHFPREGVFVSNGTHWFVTQRNFYEPQIITTDNTFVSGNCDVVIGIVNNTVYDPLQPELDSFKEELDKYFKNHTSPDVDLGDISGINASVVNIQKEIDRLNEVAKNLNESLIDLQELGKYEQYIKWPWYIWLGFIAGLIAIVMVTIMLCCMTSCCSCLKGCCSCGSCCKFDEDDSEPVLKGVKLHYT

SEQ ID NO: 27980 - DNA, 3810 bp, synthetic construct
  source 1..3810: mol_type = other DNA
atgtttgtcttcctggtcttgctgccgctcgtgtctagccagtgcgtgaatctcatcacccgcacccagtcctacactaacagcttcacccgaggggtgtattaccctgacaaggtattccggtcctccgtcctccatagcacgcaggacctttttctgcccttcttctcaaatgtgacatggttccatgccattagcggcacgaatggaacgaagcgctttgataaccccgtgctgcctttcaatgacggcgtctacttcgcctccactgaaaagtcaaacatcatccggggctggatctttggcaccactcttgattcaaagacccagtcactgctgattgtgaacaatgctacaaacgtggttatcaaggtgtgtgagtttcagttctgtaacgatccatttttggatgtgtactaccacaagaacaacaagtcctggatggagtctgagttcagagtgtatagctctgctaacaactgcaccttcgagtacgtgtcccagcctttccttatggacctggaaggcaaacagggcaatttcaaaaacctgagagagttcgtgtttaagaacattgacggatacttcaaaatttattctaagcacacaccaattaacttaggtcgggacctaccccaaggctttagcgccctagagcccctggttgacctgcccattgggatcaatataacaaggttccaaactctactggctctgcatagaagttatctgaccccaggagacagctctagtggttggaccgccggcgcagcagcctactatgtcgggtacttacagccacgcacgttccttctgaagtacaatgagaacgggacaatcactgacgcagtagactgtgcactggacccgctaagcgagactaagtgcacacttaaatccttcacggtggagaaaggcatttatcagacctctaacttcagggtgcagccaacagaaagcattgtgcgattcccaaatattactaatctttgccctttcgacgaggtctttaatgcaactagattcgcatcagtctatgcgtggaaccgcaaacgcatttccaattgtgtcgcagactactcagtgctgtacaactttgcccctttctttgcgttcaagtgttacggagtgtcacccactaaactgaacgacctgtgctttacaaatgtctacgctgactccttcgtgattaggggaaacgaggtgagtcaaattgcccccggacagactgggaacattgccgactacaattataagcttcctgatgatttcactggctgtgttattgcctggaatagtaacaagctggatagcaaggtgggaggcaactataactacaggtatcgactgtttaggaagagtaatctgaaaccatttgagcgggatatttccacagaaatttaccaggccgggaacaaaccatgtaatggggtggccggagtcaattgttacttcccactccagagctatggtttcagacccacctatggagtgggtcaccagccctatagagtcgtggtgcttagttttgagctgcttcacgccccagcaaccgtctgcggtcccaaaaagtcgaccaatctcgtgaaaaacaaatgcgtaaacttcaactttaacggcttaacaggaaccggcgtgctcaccgaaagcaacaagaaattccttccatttcagcaattcggaagggacatcgccgacacaacagacgcggtgagggacccacagactctggagatactggacatcactccttgttcgtttgggggcgtctcggtcatcacacccgggactaatactagtaatcaggtagcagttttatatcaaggcgtcaactgtaccgaagtacctgtggccatacacgctgatcagctaacgccaacatggcgagtctattccaccggctctaacgtttttcagaccagggctgggtgcctgataggggcagagtatgtcaataattcctatgagtgtgatatccccataggtgcggggatctgtgccagctatcaaacccaaaccaaatcacacgggagcgcaagctctgtggcttctcagagcataattgcatatacaatgtcactgggcgctgagaatagcgttgcatactctaataacagcatagccattcccacgaactttactatcagtgtgacaaccgaaatattgccagtttcgatgaccaaaactagcgtggattgcacgatgtacatctgtggagactctaccgaatgcagcaatctgctattacaatatggcagcttctgtacacagttaaagcgagccttgacaggcatcgcagtggaacaggacaaaaatactcaagaggtgtttgcacaggtgaagcaaatctacaaaacgccccccattaaatattttggcgggttcaatttttcacaaattctccccgacccgtctaagccgagtaagcggtccttcatcgaagatctgctctttaacaaagtaaccctcgccgatgccggctttattaagcagtatggcgactgcctgggggatatagccgctcgtgacctgatttgcgcccagaagttcaatggtctgaccgtgttgcctcctttattgaccgatgaaatgattgcccagtacactagtgccctgctggccggcactatcacgtctgggtggaccttcggagctggtgccgccttgcagataccttttgcaatgcagatggcctataggtttaatggtatcggagtgactcagaacgtactgtacgagaaccagaagctcatcgctaatcaatttaactccgctatcggaaaaatccaggacagcctctcttctacagctagcgctctgggcaaactgcaggatgtcgttaatcataatgcccaggccctgaacaccttggttaaacaactatcttccaagttcggggccatatccagtgtgttgaatgatattctctcccgcttggatccacctgaagctgaggtgcagatcgatcgcttgatcaccggcagactgcagtccctccagacatatgtaactcagcagctgattagagccgccgagataagggcaagtgcgaatctggctgccaccaagatgagcgaatgtgtattgggccagagcaaacgagttgatttttgcggtaaggggtatcatttaatgtctttccctcaatccgcacctcatggcgtagttttcctgcatgtgacttatgtcccggctcaggagaagaattttaccacagcccccgcgatctgccatgacggaaaggcccacttcccccgggaaggcgtgtttgtatccaatgggactcactggtttgtcactcagcgaaatttttatgaaccacagatcatcaccactgacaacacatttgttagtggaaactgcgatgtggtcatcggcatcgtgaataacactgtctatgatccactgcaacctgaactggattcttttaaagaggaactcgacaagtattttaaaaaccacactagccctgacgtggatctcggtgacatttctggcatcaacgctagcgtagtgaacattcagaaagagatagatagacttaatgaggtggccaagaacctcaacgaaagtctgatcgacctccaggaactggggaaatacgagcagtacattaaatggccttggtacatatggctggggttcattgctgggctgatcgcaatagtgatggtgaccataatgctctgttgcatgactagctgctgcagctgcctgaagggctgctgtagttgtgggtcatgttgtaagtttgacgaagatgatagcgagcctgtccttaaaggagtgaagctccactacacctagtaa

SEQ ID NO: 27981 - DNA, 13892 bp, synthetic construct
  source 1..13892: mol_type = other DNA
atgggcggcgcatgagagaagcccagaccaattacctacccaaaatggagaaagttcacgttgacatcgaggaagacagcccattcctcagagctttgcagcggagcttcccgcagtttgaggtagaagccaagcaggtcactgataatgaccatgctaatgccagagcgttttcgcatctggcttcaaaactgatcgaaacggaggtggacccatccgacacgatccttgacattggaagtgcgcccgcccgcagaatgtattctaagcacaagtatcattgtatctgtccgatgagatgtgcggaagatccggacagattgtataagtatgcaactaagctgaagaaaaactgtaaggaaataactgataaggaattggacaagaaaatgaaggagctcgccgccgtcatgagcgaccctgacctggaaactgagactatgtgcctccacgacgacgagtcgtgtcgctacgaagggcaagtcgctgtttaccaggatgtatacgcggttgacggaccgacaagtctctatcaccaagccaataagggagttagagtcgcctactggataggctttgacaccaccccttttatgtttaagaacttggctggagcatatccatcatactctaccaactgggccgacgaaaccgtgttaacggctcgtaacataggcctatgcagctctgacgttatggagcggtcacgtagagggatgtccattcttagaaagaagtatttgaaaccatccaacaatgttctattctctgttggctcgaccatctaccacgagaagagggacttactgaggagctggcacctgccgtctgtatttcacttacgtggcaagcaaaattacacatgtcggtgtgagactatagttagttgcgacgggtacgtcgttaaaagaatagctatcagtccaggcctgtatgggaagccttcaggctatgctgctacgatgcaccgcgagggattcttgtgctgcaaagtgacagacacattgaacggggagagggtctcttttcccgtgtgcacgtatgtgccagctacattgtgtgaccaaatgactggcatactggcaacagatgtcagtgcggacgacgcgcaaaaactgctggttgggctcaaccagcgtatagtcgtcaacggtcgcacccagagaaacaccaataccatgaaaaattaccttttgcccgtagtggcccaggcatttgctaggtgggcaaaggaatataaggaagatcaagaagatgaaaggccactaggactacgagatagacagttagtcatggggtgttgttgggcttttagaaggcacaagataacatctatttataagcgcccggatacccaaaccatcatcaaagtgaacagcgatttccactcattcgtgctgcccaggataggcagtaacacattggagatcgggctgagaacaagaatcaggaaaatgttagaggagcacaaggagccgtcacctctcattaccgccgaggacgtacaagaagctaagtgcgcagccgatgaggctaaggaggtgcgtgaagccgaggagttgcgcgcagctctaccacctttggcagctgatgttgaggagcccactctggaagccgatgtcgacttgatgttacaagaggctggggccggctcagtggagacacctcgtggcttgataaaggttaccagctacgctggcgaggacaagatcggctcttacgctgtgctttctccgcaggctgtactcaagagtgaaaaattatcttgcatccaccctctcgctgaacaagtcatagtgataacacactctggccgaaaagggcgttatgccgtggaaccataccatggtaaagtagtggtgccagagggacatgcaatacccgtccaggactttcaagctctgagtgaaagtgccaccattgtgtacaacgaacgtgagttcgtaaacaggtacctgcaccatattgccacacatggaggagcgctgaacactgatgaagaatattacaaaactgtcaagcccagcgagcacgacggcgaatacctgtacgacatcgacaggaaacagtgcgtcaagaaagaactagtcactgggctagggctcacaggcgagctggtggatcctcccttccatgaattcgcctacgagagtctgagaacacgaccagccgctccttaccaagtaccaaccataggggtgtatggcgtgccaggatcaggcaagtctggcatcattaaaagcgcagtcaccaaaaaagatctagtggtgagcgccaagaaagaaaactgtgcagaaattataagggacgtcaagaaaatgaaagggctggacgtcaatgccagaactgtggactcagtgctcttgaatggatgcaaacaccccgtagagaccctgtatattgacgaagcttttgcttgtcatgcaggtactctcagagcgctcatagccattataagacctaaaaaggcagtgctctgcggggatcccaaacagtgcggtttttttaacatgatgtgcctgaaagtgcattttaaccacgagatttgcacacaagtcttccacaaaagcatctctcgccgttgcactaaatctgtgacttcggtcgtctcaaccttgttttacgacaaaaaaatgagaacgacgaatccgaaagagactaagattgtgattgacactaccggcagtaccaaacctaagcaggacgatctcattctcacttgtttcagagggtgggtgaagcagttgcaaatagattacaaaggcaacgaaataatgacggcagctgcctctcaagggctgacccgtaaaggtgtgtatgccgttcggtacaaggtgaatgaaaatcctctgtacgcacccacctcagaacatgtgaacgtcctactgacccgcacggaggaccgcatcgtgtggaaaacactagccggcgacccatggataaaaacactgactgccaagtaccctgggaatttcactgccacgatagaggagtggcaagcagagcatgatgccatcatgaggcacatcttggagagaccggaccctaccgacgtcttccagaataaggcaaacgtgtgttgggccaaggctttagtgccggtgctgaagaccgctggcatagacatgaccactgaacaatggaacactgtggattattttgaaacggacaaagctcactcagcagagatagtattgaaccaactatgcgtgaggttctttggactcgatctggactccggtctattttctgcacccactgttccgttatccattaggaataatcactgggataactccccgtcgcctaacatgtacgggctgaataaagaagtggtccgtcagctctctcgcaggtacccacaactgcctcgggcagttgccactggaagagtctatgacatgaacactggtacactgcgcaattatgatccgcgcataaacctagtacctgtaaacagaagactgcctcatgctttagtcctccaccataatgaacacccacagagtgacttttcttcattcgtcagcaaattgaagggcagaactgtcctggtggtcggggaaaagttgtccgtcccaggcaaaatggttgactggttgtcagaccggcctgaggctaccttcagagctcggctggatttaggcatcccaggtgatgtgcccaaatatgacataatatttgttaatgtgaggaccccatataaataccatcactatcagcagtgtgaagaccatgccattaagcttagcatgttgaccaagaaagcttgtctgcatctgaatcccggcggaacctgtgtcagcataggttatggttacgctgacagggccagcgaaagcatcattggtgctatagcgcggcagttcaagttttcccgggtatgcaaaccgaaatcctcacttgaagagacggaagttctgtttgtattcattgggtacgatcgcaaggcccgtacgcacaatccttacaagctttcatcaaccttgaccaacatttatacaggttccagactccacgaagccggatgtgcaccctcatatcatgtggtgcgaggggatattgccacggccaccgaaggagtgattataaatgctgctaacagcaaaggacaacctggcggaggggtgtgcggagcgctgtataagaaattcccggaaagcttcgatttacagccgatcgaagtaggaaaagcgcgactggtcaaaggtgcagctaaacatatcattcatgccgtaggaccaaacttcaacaaagtttcggaggttgaaggtgacaaacagttggcagaggcttatgagtccatcgctaagattgtcaacgataacaattacaagtcagtagcgattccactgttgtccaccggcatcttttccgggaacaaagatcgactaacccaatcattgaaccatttgctgacagctttagacaccactgatgcagatgtagccatatactgcagggacaagaaatgggaaatgactctcaaggaagcagtggctaggagagaagcagtggaggagatatgcatatccgacgactcttcagtgacagaacctgatgcagagctggtgagggtgcatccgaagagttctttggctggaaggaagggctacagcacaagcgatggcaaaactttctcatatttggaagggaccaagtttcaccaggcggccaaggatatagcagaaattaatgccatgtggcccgttgcaacggaggccaatgagcaggtatgcatgtatatcctcggagaaagcatgagcagtattaggtcgaaatgccccgtcgaagagtcggaagcctccacaccacctagcacgctgccttgcttgtgcatccatgccatgactccagaaagagtacagcgcctaaaagcctcacgtccagaacaaattactgtgtgctcatcctttccattgccgaagtatagaatcactggtgtgcagaagatccaatgctcccagcctatattgttctcaccgaaagtgcctgcgtatattcatccaaggaagtatctcgtggaaacaccaccggtagacgagactccggagccatcggcagagaaccaatccacagaggggacacctgaacaaccaccacttataaccgaggatgagaccaggactagaacgcctgagccgatcatcatcgaagaggaagaagaggatagcataagtttgctgtcagatggcccgacccaccaggtgctgcaagtcgaggcagacattcacgggccgccctctgtatctagctcatcctggtccattcctcatgcatccgactttgatgtggacagtttatccatacttgacaccctggagggagctagcgtgaccagcggggcaacgtcagccgagactaactcttacttcgcaaagagtatggagtttctggcgcgaccggtgcctgcgcctcgaacagtattcaggaaccctccacatcccgctccgcgcacaagaacaccgtcacttgcacccagcagggcctgctcgagaaccagcctagtttccaccccgccaggcgtgaatagggtgatcactagagaggagctcgaggcgcttaccccgtcacgcactcctagcaggtcggtctcgagaaccagcctggtctccaacccgccaggcgtaaatagggtgattacaagagaggagtttgaggcgttcgtagcacaacaacaatgacggtttgatgcgggtgcatacatcttttcctccgacaccggtcaagggcatttacaacaaaaatcagtaaggcaaacggtgctatccgaagtggtgttggagaggaccgaattggagatttcgtatgccccgcgcctcgaccaagaaaaagaagaattactacgcaagaaattacagttaaatcccacacctgctaacagaagcagataccagtccaggaaggtggagaacatgaaagccataacagctagacgtattctgcaaggcctagggcattatttgaaggcagaaggaaaagtggagtgctaccgaaccctgcatcctgttcctttgtattcatctagtgtgaaccgtgccttttcaagccccaaggtcgcagtggaagcctgtaacgccatgttgaaagagaactttccgactgtggcttcttactgtattattccagagtacgatgcctatttggacatggttgacggagcttcatgctgcttagacactgccagtttttgccctgcaaagctgcgcagctttccaaagaaacactcctatttggaacccacaatacgatcggcagtgccttcagcgatccagaacacgctccagaacgtcctggcagctgccacaaaaagaaattgcaatgtcacgcaaatgagagaattgcccgtattggattcggcggcctttaatgtggaatgcttcaagaaatatgcgtgtaataatgaatattgggaaacgtttaaagaaaaccccatcaggcttactgaagaaaacgtggtaaattacattaccaaattaaaaggaccaaaagctgctgctctttttgcgaagacacataatttgaatatgttgcaggacataccaatggacaggtttgtaatggacttaaagagagacgtgaaagtgactccaggaacaaaacatactgaagaacggcccaaggtacaggtgatccaggctgccgatccgctagcaacagcgtatctgtgcggaatccaccgagagctggttaggagattaaatgcggtcctgcttccgaacattcatacactgtttgatatgtcggctgaagactttgacgctattatagccgagcacttccagcctggggattgtgttctggaaactgacatcgcgtcgtttgataaaagtgaggacgacgccatggctctgaccgcgttaatgattctggaagacttaggtgtggacgcagagctgttgacgctgattgaggcggctttcggcgaaatttcatcaatacatttgcccactaaaactaaatttaaattcggagccatgatgaaatctggaatgttcctcacactgtttgtgaacacagtcattaacattgtaatcgcaagcagagtgttgagagaacggctaaccggatcaccatgtgcagcattcattggagatgacaatatcgtgaaaggagtcaaatcggacaaattaatggcagacaggtgcgccacctggttgaatatggaagtcaagattatagatgctgtggtgggcgagaaagcgccttatttctgtggagggtttattttgtgtgactccgtgaccggcacagcgtgccgtgtggcagaccccctaaaaaggctgtttaagcttggcaaacctctggcagcagacgatgaacatgatgatgacaggagaagggcattgcatgaagagtcaacacgctggaaccgagtgggtattctttcagagctgtgcaaggcagtagaatcaaggtatgaaaccgtaggaacttccatcatagttatggccatgactactctagctagcagtgttaaatcattcagctacctgagaggggcccctataactctctacggctaacctgaatggactacgactctagaatagtctttaattaagccaccatgtcagataatgggcctcagaaccagcggaatgcccccaggatcacgttcggtgggccttcagattcaactggaagcaatcagaacggggaaagatccggtgcaaggtccaagcaacgccgaccccagggattgcctaataatacagcaagttggtttactgcactgacccaacacgggaaagaggaccttaaatttccgcgggggcaaggagtacctataaacactaatagcagccccgatgaccaaattgggtactaccgcagagcaacccggcgaatcagagggggtgacggtaagatgaaggacctctcccccaggtggtacttctactatttgggaacggggccagaagccggactgccctacggcgcaaacaaagacggtataatatgggtcgccactgagggcgctctgaatacgccaaaagatcacattggtactagaaacccggcgaacaatgcggcaattgtgcttcagctccctcaaggaacaacgttgccaaaaggattttacgcagagggatcacgggggggttcccaggctagttctcgcagttcctcaaggagtcgaaattccagtaggaactcaaccccaggctcaagccgcgggacttcacctgcaagaatggccggtaacgggggagacgctgctttggctcttcttctccttgatcgccttaatcagcttgagtctaagatgtctggtaaaggccaacagcaacaaggacagacggtaacgaaaaaatccgccgccgaggcctctaaaaaaccgagacaaaaacggactgctacgaaagcgtataacgtcactcaggcttttggtaggcggggcccggaacaaacccagggtaattttggcgatcaggaactgattagacaaggcaccgactacaagcactggcctcagatcgcgcagtttgcaccctccgcttcagcgttcttcgggatgtcacgcatcgggatggaggttacaccgagtggaacatggctgacatatactggtgcaatcaagctggacgacaaggatcccaacttcaaagatcaagttatactcctcaacaaacatatcgatgcgtataagacattccccccgacggaacccaaaaaagataaaaaaaagaaggccgacgagacccaagccctcccacaacgacaaaagaaacaacaaacagtaacactgctcccagccgcagacttggatgatttctccaaacagttgcagcaatctatgagttcagccgatagtactcaggccggcggttctggaggtgtccgtgctgaaggacgcgggtcccttctcacctgcggcgacgttgaggaaaaccctggccctatggctggcaacgtagctttccagaccgtgaagccgggaaatttcaacaaggacttctacgacttcgccgtcagcaagggattctttaaagaaggaagctccggtgccagtcagagagtcgccggcgactcaggctttgccgcgtatagccgatatcggattggcaatgacggtgtcccgttcgtggtctcgaccggatatcacttccgtgaactaggggtatatctgaccttctacttgacgaacgacgtgtcgttcctagcgcatattcaatggatggtcatgttcacgccaggcttaatgtggctgtcttatttcatcgcctcttttagactgttcgctaggacaaggagcatgtttgagtattaccacactactgaccccagttttctaggacgctacatgagtgctttgaatcataccaagaagtggaaatacccacagatttccaatgagaagcaggagatccttggaacagttagttggaatttgagggaagccacgacgagacaggttgtgaacgtggttacgacaaaaatcgcactgaagacactagcctgcttcgtgctggccgccgtttaccgcatcaattggattaccggacccggaccaggcgccaaatttgttgctgcttggacactgaaagctgctgctgggcccggaccaggccagtacatcaaggccaactctaagtttatcggcatcaccgaattgggacctggacccggctagtgattcgaagggcccctataactctctacggctaacctgaatggactacgacatagtctagtccgccaaggccaccatgtttgtcttcctggtcttgctgccgctggtgagcagccagtgcgtgaatttcaccacccgcacccagcttccacctgcctacactaacagcttcacccgaggggtgtattaccctgacaaggtattccggtcctccgtcctccatagcacgcaggacctttttctgcccttcttctcaaatgtgacatggttccatgccattcacgtgagcggcacgaatggaacgaagcgctttgctaaccccgtgctgcctttcaatgacggcgtctacttcgcctccactgaaaagtcaaacatcatccggggctggatctttggcaccactcttgattcaaagacccagtcactgctgattgtgaacaatgctacaaacgtggttatcaaggtgtgtgagtttcagttctgtaacgatccatttttgggagtgtactaccacaagaacaacaagtcctggatggagtctgagttcagagtgtatagctctgctaacaactgcaccttcgagtacgtgtcccagcctttccttatggacctggaaggcaaacagggcaatttcaaaaacctgagagagttcgtgtttaagaacattgacggatacttcaaaatttattctaagcacacaccaattaacttagtgcggggcctaccccaaggctttagcgccctagagcccctggttgacctgcccattgggatcaatataacaaggttccaaactctacatataagttatctgaccccaggagacagctctagtggttggaccgccggcgcagcagcctactatgtcgggtacttacagccacgcacgttccttctgaagtacaatgagaacgggacaatcactgacgcagtagactgtgcactggacccgctaagcgagactaagtgcacacttaaatccttcacggtggagaaaggcatttatcagacctctaacttcagggtgcagccaacagaaagcattgtgcgattcccaaatattactaatctttgccctttcggggaggtctttaatgcaactagattcgcatcagtctatgcgtggaaccgcaaacgcatttccaattgtgtcgcagactactcagtgctgtacaactctgcctctttcagtacgttcaagtgttacggagtgtcacccactaaactgaacgacctgtgctttacaaatgtctacgctgactccttcgtgattaggggagacgaggtgagacaaattgcccccggacagactgggaatattgccgactacaattataagcttcctgatgatttcactggctgtgttattgcctggaatagtaacaatctggatagcaaggtgggaggcaactataactacttatatcgactgtttaggaagagtaatctgaaaccatttgagcgggatatttccacagaaatttaccaggccgggagcacaccatgtaatggggtgaagggatttaattgttacttcccactccagagctatggtttccaacccacctatggagtgggttaccagccctatagagtcgtggtgcttagttttgagctgcttcacgccccagcaaccgtctgcggtcccaaaaagtcgaccaatctcgtgaaaaacaaatgcgtaaacttcaactttaacggcttaacaggaaccggcgtgctcaccgaaagcaacaagaaattccttccatttcagcaattcggaagggacatcgccgacacaacagacgcggtgagggacccacagactctggagatactggacatcactccttgttcgtttgggggcgtctcggtcatcacacccgggactaatactagtaatcaggtagcagttttatatcaaggcgtcaactgtaccgaagtacctgtggccatacacgctgatcagctaacgccaacatggcgagtctattccaccggctctaacgtttttcagaccagggctgggtgcctgataggggcagagcacgtcaataattcctatgagtgtgatatccccataggtgcggggatctgtgccagctatcaaacccaaaccaattcaccagggagcgcaagctctgtggcttctcagagcataattgcatatacaatgtcactgggcgttgagaatagcgttgcatactctaataacagcatagccattcccacgaactttactatcagtgtgacaaccgaaatattgccagtttcgatgaccaaaactagcgtggattgcacgatgtacatctgtggagactctaccgaatgcagcaatctgctattacaatatggcagcttctgtacacagttaaatcgagccttgacaggcatcgcagtggaacaggacaaaaatactcaagaggtgtttgcacaggtgaagcaaatctacaaaacgccccccattaaagattttggcgggttcaatttttcacaaattctccccgacccgtctaagccgagtaagcggtccttcatcgaagatctgctctttaacaaagtaaccctcgccgatgccggctttattaagcagtatggcgactgcctgggggatatagccgctcgtgacctgatttgcgcccagaagttcaatggtctgaccgtgttgcctcctttattgaccgatgaaatgattgcccagtacactagtgccctgctggccggcactatcacgtctgggtggaccttcggagctggtgccgccttgcagataccttttgcaatgcagatggcctataggtttaatggtatcggagtgactcagaacgtactgtacgagaaccagaagctcatcgctaatcaatttaactccgctatcggaaaaatccaggacagcctctcttctacagctagcgctctgggcaaactgcaggatgtcgttaatcagaatgcccaggccctgaacaccttggttaaacaactatcttccaacttcggggccatatccagtgtgttgaatgatattctctcccgcttggatccacctgaagctgaggtgcagatcgatcgcttgatcaccggcagactgcagtccctccagacatatgtaactcagcagctgattagagccgccgagataagggcaagtgcgaatctggctgccaccaagatgagcgaatgtgtattgggccagagcaaacgagttgatttttgcggtaaggggtatcatttaatgtctttccctcaatccgcacctcatggcgtagttttcctgcatgtgacttatgtcccggctcaggagaagaattttaccacagcccccgcgatctgccatgacggaaaggcccacttcccccgggaaggcgtgtttgtatccaatgggactcactggtttgtcactcagcgaaatttttatgaaccacagatcatcaccactgacaacacatttgttagtggaaactgcgatgtggtcatcggcatcgtgaataacactgtctatgatccactgcaacctgaactggattcttttaaagaggaactcgacaagtattttaaaaaccacactagccctgacgtggatctcggtgacatttctggcatcaacgctagcgtagtgaacattcagaaagagatagatagacttaatgaggtggccaagaacctcaacgaaagtctgatcgacctccaggaactggggaaatacgagcagtacattaaatggccttggtacatatggctggggttcattgctgggctgatcgcaatagtgatggtgaccataatgctctgttgcatgactagctgctgcagctgcctgaagggctgctgtagttgtgggtcatgttgtaagtttgacgaagatgatagcgagcctgtccttaaaggagtgaagctccactacacctagtaattcgaacggccgtatcacgcccaaacatttacagccgcggtgtcaaaaaccgcgtggacgtggttaacatccctgctgggaggatcagccgtaattattataattggcttggtgctggctactattgtggccatgtacgtgctgaccaaccagaaacataattgaatacagcagcaattggcaagctgcttacatagaactcgcggcgattggcatgccgccttaaaatttttattttattttttcttttcttttccgaatcggattttgtttttaatatttcaaaaaaaaaaaaaaaaaaaaaaaaaaaaaaaaaaaaaaaaaaaaaaaaaaaaaaaaaaaaaaaaaaaaaaaaaaaaaaaa

SEQ ID NO: 27982 - DNA, 13634 bp, synthetic construct
  source 1..13634: mol_type = other DNA
atgggcggcgcatgagagaagcccagaccaattacctacccaaaatggagaaagttcacgttgacatcgaggaagacagcccattcctcagagctttgcagcggagcttcccgcagtttgaggtagaagccaagcaggtcactgataatgaccatgctaatgccagagcgttttcgcatctggcttcaaaactgatcgaaacggaggtggacccatccgacacgatccttgacattggaagtgcgcccgcccgcagaatgtattctaagcacaagtatcattgtatctgtccgatgagatgtgcggaagatccggacagattgtataagtatgcaactaagctgaagaaaaactgtaaggaaataactgataaggaattggacaagaaaatgaaggagctcgccgccgtcatgagcgaccctgacctggaaactgagactatgtgcctccacgacgacgagtcgtgtcgctacgaagggcaagtcgctgtttaccaggatgtatacgcggttgacggaccgacaagtctctatcaccaagccaataagggagttagagtcgcctactggataggctttgacaccaccccttttatgtttaagaacttggctggagcatatccatcatactctaccaactgggccgacgaaaccgtgttaacggctcgtaacataggcctatgcagctctgacgttatggagcggtcacgtagagggatgtccattcttagaaagaagtatttgaaaccatccaacaatgttctattctctgttggctcgaccatctaccacgagaagagggacttactgaggagctggcacctgccgtctgtatttcacttacgtggcaagcaaaattacacatgtcggtgtgagactatagttagttgcgacgggtacgtcgttaaaagaatagctatcagtccaggcctgtatgggaagccttcaggctatgctgctacgatgcaccgcgagggattcttgtgctgcaaagtgacagacacattgaacggggagagggtctcttttcccgtgtgcacgtatgtgccagctacattgtgtgaccaaatgactggcatactggcaacagatgtcagtgcggacgacgcgcaaaaactgctggttgggctcaaccagcgtatagtcgtcaacggtcgcacccagagaaacaccaataccatgaaaaattaccttttgcccgtagtggcccaggcatttgctaggtgggcaaaggaatataaggaagatcaagaagatgaaaggccactaggactacgagatagacagttagtcatggggtgttgttgggcttttagaaggcacaagataacatctatttataagcgcccggatacccaaaccatcatcaaagtgaacagcgatttccactcattcgtgctgcccaggataggcagtaacacattggagatcgggctgagaacaagaatcaggaaaatgttagaggagcacaaggagccgtcacctctcattaccgccgaggacgtacaagaagctaagtgcgcagccgatgaggctaaggaggtgcgtgaagccgaggagttgcgcgcagctctaccacctttggcagctgatgttgaggagcccactctggaagccgatgtcgacttgatgttacaagaggctggggccggctcagtggagacacctcgtggcttgataaaggttaccagctacgctggcgaggacaagatcggctcttacgctgtgctttctccgcaggctgtactcaagagtgaaaaattatcttgcatccaccctctcgctgaacaagtcatagtgataacacactctggccgaaaagggcgttatgccgtggaaccataccatggtaaagtagtggtgccagagggacatgcaatacccgtccaggactttcaagctctgagtgaaagtgccaccattgtgtacaacgaacgtgagttcgtaaacaggtacctgcaccatattgccacacatggaggagcgctgaacactgatgaagaatattacaaaactgtcaagcccagcgagcacgacggcgaatacctgtacgacatcgacaggaaacagtgcgtcaagaaagaactagtcactgggctagggctcacaggcgagctggtggatcctcccttccatgaattcgcctacgagagtctgagaacacgaccagccgctccttaccaagtaccaaccataggggtgtatggcgtgccaggatcaggcaagtctggcatcattaaaagcgcagtcaccaaaaaagatctagtggtgagcgccaagaaagaaaactgtgcagaaattataagggacgtcaagaaaatgaaagggctggacgtcaatgccagaactgtggactcagtgctcttgaatggatgcaaacaccccgtagagaccctgtatattgacgaagcttttgcttgtcatgcaggtactctcagagcgctcatagccattataagacctaaaaaggcagtgctctgcggggatcccaaacagtgcggtttttttaacatgatgtgcctgaaagtgcattttaaccacgagatttgcacacaagtcttccacaaaagcatctctcgccgttgcactaaatctgtgacttcggtcgtctcaaccttgttttacgacaaaaaaatgagaacgacgaatccgaaagagactaagattgtgattgacactaccggcagtaccaaacctaagcaggacgatctcattctcacttgtttcagagggtgggtgaagcagttgcaaatagattacaaaggcaacgaaataatgacggcagctgcctctcaagggctgacccgtaaaggtgtgtatgccgttcggtacaaggtgaatgaaaatcctctgtacgcacccacctcagaacatgtgaacgtcctactgacccgcacggaggaccgcatcgtgtggaaaacactagccggcgacccatggataaaaacactgactgccaagtaccctgggaatttcactgccacgatagaggagtggcaagcagagcatgatgccatcatgaggcacatcttggagagaccggaccctaccgacgtcttccagaataaggcaaacgtgtgttgggccaaggctttagtgccggtgctgaagaccgctggcatagacatgaccactgaacaatggaacactgtggattattttgaaacggacaaagctcactcagcagagatagtattgaaccaactatgcgtgaggttctttggactcgatctggactccggtctattttctgcacccactgttccgttatccattaggaataatcactgggataactccccgtcgcctaacatgtacgggctgaataaagaagtggtccgtcagctctctcgcaggtacccacaactgcctcgggcagttgccactggaagagtctatgacatgaacactggtacactgcgcaattatgatccgcgcataaacctagtacctgtaaacagaagactgcctcatgctttagtcctccaccataatgaacacccacagagtgacttttcttcattcgtcagcaaattgaagggcagaactgtcctggtggtcggggaaaagttgtccgtcccaggcaaaatggttgactggttgtcagaccggcctgaggctaccttcagagctcggctggatttaggcatcccaggtgatgtgcccaaatatgacataatatttgttaatgtgaggaccccatataaataccatcactatcagcagtgtgaagaccatgccattaagcttagcatgttgaccaagaaagcttgtctgcatctgaatcccggcggaacctgtgtcagcataggttatggttacgctgacagggccagcgaaagcatcattggtgctatagcgcggcagttcaagttttcccgggtatgcaaaccgaaatcctcacttgaagagacggaagttctgtttgtattcattgggtacgatcgcaaggcccgtacgcacaatccttacaagctttcatcaaccttgaccaacatttatacaggttccagactccacgaagccggatgtgcaccctcatatcatgtggtgcgaggggatattgccacggccaccgaaggagtgattataaatgctgctaacagcaaaggacaacctggcggaggggtgtgcggagcgctgtataagaaattcccggaaagcttcgatttacagccgatcgaagtaggaaaagcgcgactggtcaaaggtgcagctaaacatatcattcatgccgtaggaccaaacttcaacaaagtttcggaggttgaaggtgacaaacagttggcagaggcttatgagtccatcgctaagattgtcaacgataacaattacaagtcagtagcgattccactgttgtccaccggcatcttttccgggaacaaagatcgactaacccaatcattgaaccatttgctgacagctttagacaccactgatgcagatgtagccatatactgcagggacaagaaatgggaaatgactctcaaggaagcagtggctaggagagaagcagtggaggagatatgcatatccgacgactcttcagtgacagaacctgatgcagagctggtgagggtgcatccgaagagttctttggctggaaggaagggctacagcacaagcgatggcaaaactttctcatatttggaagggaccaagtttcaccaggcggccaaggatatagcagaaattaatgccatgtggcccgttgcaacggaggccaatgagcaggtatgcatgtatatcctcggagaaagcatgagcagtattaggtcgaaatgccccgtcgaagagtcggaagcctccacaccacctagcacgctgccttgcttgtgcatccatgccatgactccagaaagagtacagcgcctaaaagcctcacgtccagaacaaattactgtgtgctcatcctttccattgccgaagtatagaatcactggtgtgcagaagatccaatgctcccagcctatattgttctcaccgaaagtgcctgcgtatattcatccaaggaagtatctcgtggaaacaccaccggtagacgagactccggagccatcggcagagaaccaatccacagaggggacacctgaacaaccaccacttataaccgaggatgagaccaggactagaacgcctgagccgatcatcatcgaagaggaagaagaggatagcataagtttgctgtcagatggcccgacccaccaggtgctgcaagtcgaggcagacattcacgggccgccctctgtatctagctcatcctggtccattcctcatgcatccgactttgatgtggacagtttatccatacttgacaccctggagggagctagcgtgaccagcggggcaacgtcagccgagactaactcttacttcgcaaagagtatggagtttctggcgcgaccggtgcctgcgcctcgaacagtattcaggaaccctccacatcccgctccgcgcacaagaacaccgtcacttgcacccagcagggcctgctcgagaaccagcctagtttccaccccgccaggcgtgaatagggtgatcactagagaggagctcgaggcgcttaccccgtcacgcactcctagcaggtcggtctcgagaaccagcctggtctccaacccgccaggcgtaaatagggtgattacaagagaggagtttgaggcgttcgtagcacaacaacaatgacggtttgatgcgggtgcatacatcttttcctccgacaccggtcaagggcatttacaacaaaaatcagtaaggcaaacggtgctatccgaagtggtgttggagaggaccgaattggagatttcgtatgccccgcgcctcgaccaagaaaaagaagaattactacgcaagaaattacagttaaatcccacacctgctaacagaagcagataccagtccaggaaggtggagaacatgaaagccataacagctagacgtattctgcaaggcctagggcattatttgaaggcagaaggaaaagtggagtgctaccgaaccctgcatcctgttcctttgtattcatctagtgtgaaccgtgccttttcaagccccaaggtcgcagtggaagcctgtaacgccatgttgaaagagaactttccgactgtggcttcttactgtattattccagagtacgatgcctatttggacatggttgacggagcttcatgctgcttagacactgccagtttttgccctgcaaagctgcgcagctttccaaagaaacactcctatttggaacccacaatacgatcggcagtgccttcagcgatccagaacacgctccagaacgtcctggcagctgccacaaaaagaaattgcaatgtcacgcaaatgagagaattgcccgtattggattcggcggcctttaatgtggaatgcttcaagaaatatgcgtgtaataatgaatattgggaaacgtttaaagaaaaccccatcaggcttactgaagaaaacgtggtaaattacattaccaaattaaaaggaccaaaagctgctgctctttttgcgaagacacataatttgaatatgttgcaggacataccaatggacaggtttgtaatggacttaaagagagacgtgaaagtgactccaggaacaaaacatactgaagaacggcccaaggtacaggtgatccaggctgccgatccgctagcaacagcgtatctgtgcggaatccaccgagagctggttaggagattaaatgcggtcctgcttccgaacattcatacactgtttgatatgtcggctgaagactttgacgctattatagccgagcacttccagcctggggattgtgttctggaaactgacatcgcgtcgtttgataaaagtgaggacgacgccatggctctgaccgcgttaatgattctggaagacttaggtgtggacgcagagctgttgacgctgattgaggcggctttcggcgaaatttcatcaatacatttgcccactaaaactaaatttaaattcggagccatgatgaaatctggaatgttcctcacactgtttgtgaacacagtcattaacattgtaatcgcaagcagagtgttgagagaacggctaaccggatcaccatgtgcagcattcattggagatgacaatatcgtgaaaggagtcaaatcggacaaattaatggcagacaggtgcgccacctggttgaatatggaagtcaagattatagatgctgtggtgggcgagaaagcgccttatttctgtggagggtttattttgtgtgactccgtgaccggcacagcgtgccgtgtggcagaccccctaaaaaggctgtttaagcttggcaaacctctggcagcagacgatgaacatgatgatgacaggagaagggcattgcatgaagagtcaacacgctggaaccgagtgggtattctttcagagctgtgcaaggcagtagaatcaaggtatgaaaccgtaggaacttccatcatagttatggccatgactactctagctagcagtgttaaatcattcagctacctgagaggggcccctataactctctacggctaacctgaatggactacgactctagaatagtctttaattaagccaccatggctggcggtcccctggtgagaaaaatcttcgtagacggagtgccatttgtggtgtctaccggctaccactttagagagctgggggtgcccgtctactctttcctgcctggcgtctacagcgtcatttatctgtatctcaccttctacctgacaaatgatgtgagtttcctggcccacatccagtggatggtcatgtttactcctggactgatgtggctcagctactttatcgcgagctttaggctcttcgcccgcacgaggtccatgaataatttggacaagtccgctgggttccctttcaacaaatggggaaaggcccgggccaccactcgtcaagttgtgaacgtcgtgaccaccaaaattgctctgaagacactagcctgcttcgtgctggccgccgtgtatagaatcaactggatcaccggaggcccataccctaatgcatccttcgataacttcaagtttgtctgtgacaacattacctacaacaaggtggagaatatgaccccacgcgatctcggcgcatgcatcgtgagggctaccgctacaatccccatccaggcctctctgccattcggctggctgatcgtgggtgtggccctgaactttaataaagacttctatgacttcgccgtctctaaggggtttttcaaggagggctcatctggaggcgatggcaagatgaaggacctgtctcctcgctggtacttttactacctgggaaccggacccaaacagggcgacgattacgtctatttgccttaccctgaccctagcagaatcttgggcgctggatgccacatcgatgcctataagacatttccccctacggagcccaagaaggacaaaaagaagaaagcagacgagtgtcggagcaaaaaccccctgctgtacgatgccaattacttcctgtgctggagcctcgctaccgtggcatattttaacatggtatacatgcccgcctcttgggtgatgaggatcatgacctggcttgacggcaattgcgatacattgaaggaaattctggtgacctataactgctgcgacgaggcttttgaatactaccacacaaccgatccaagttttcttggcagatatatgagcgccttgaaccacactaagaagtggaagtacccccagatctccaacgaaaagcaggagattctcggaaccgtgtcctggaatctgcgcgaggatattaaagacctgcctaaggagatcactgtggccacctccagaaccctgtcctattacaagctgggagcttcacagagggtggccggagatagcgggttcgccgcctatagccggtacaggatcggcaactggcctcagatcgcccagtttgctcccagcgcctcagccttcttcggaatgtcccgcatcgggatggaagtgactccttccggaacttggctcacatacaccggcgctattgattggtacgatttcgttgagaatcctgacatcctgcgggtctatgccaacctgggcgcctgccctctcattgcagccgtgatcaccagggaagttggctttgtagtgccaggattaccgggcacaattctgagaacaaccaatggagactttctgcacttccttccccgggtgttcagtgctgttggaaacatctgctacaccccttctaaactgattgagtacacagattttgccggacccggaccaggcgccaaatttgttgctgcttggacactgaaagctgctgctgggcccggaccaggccagtacatcaaggccaactctaagtttatcggcatcaccgaattgggacctggacccggctagtgattcgaagggcccctataactctctacggctaacctgaatggactacgacatagtctagtccgccaaggccaccatgtttgtcttcctggtcttgctgccgctggtgagcagccagtgcgtgaatttcaccacccgcacccagcttccacctgcctacactaacagcttcacccgaggggtgtattaccctgacaaggtattccggtcctccgtcctccatagcacgcaggacctttttctgcccttcttctcaaatgtgacatggttccatgccattcacgtgagcggcacgaatggaacgaagcgctttgctaaccccgtgctgcctttcaatgacggcgtctacttcgcctccactgaaaagtcaaacatcatccggggctggatctttggcaccactcttgattcaaagacccagtcactgctgattgtgaacaatgctacaaacgtggttatcaaggtgtgtgagtttcagttctgtaacgatccatttttgggagtgtactaccacaagaacaacaagtcctggatggagtctgagttcagagtgtatagctctgctaacaactgcaccttcgagtacgtgtcccagcctttccttatggacctggaaggcaaacagggcaatttcaaaaacctgagagagttcgtgtttaagaacattgacggatacttcaaaatttattctaagcacacaccaattaacttagtgcggggcctaccccaaggctttagcgccctagagcccctggttgacctgcccattgggatcaatataacaaggttccaaactctacatataagttatctgaccccaggagacagctctagtggttggaccgccggcgcagcagcctactatgtcgggtacttacagccacgcacgttccttctgaagtacaatgagaacgggacaatcactgacgcagtagactgtgcactggacccgctaagcgagactaagtgcacacttaaatccttcacggtggagaaaggcatttatcagacctctaacttcagggtgcagccaacagaaagcattgtgcgattcccaaatattactaatctttgccctttcggggaggtctttaatgcaactagattcgcatcagtctatgcgtggaaccgcaaacgcatttccaattgtgtcgcagactactcagtgctgtacaactctgcctctttcagtacgttcaagtgttacggagtgtcacccactaaactgaacgacctgtgctttacaaatgtctacgctgactccttcgtgattaggggagacgaggtgagacaaattgcccccggacagactgggaatattgccgactacaattataagcttcctgatgatttcactggctgtgttattgcctggaatagtaacaatctggatagcaaggtgggaggcaactataactacttatatcgactgtttaggaagagtaatctgaaaccatttgagcgggatatttccacagaaatttaccaggccgggagcacaccatgtaatggggtgaagggatttaattgttacttcccactccagagctatggtttccaacccacctatggagtgggttaccagccctatagagtcgtggtgcttagttttgagctgcttcacgccccagcaaccgtctgcggtcccaaaaagtcgaccaatctcgtgaaaaacaaatgcgtaaacttcaactttaacggcttaacaggaaccggcgtgctcaccgaaagcaacaagaaattccttccatttcagcaattcggaagggacatcgccgacacaacagacgcggtgagggacccacagactctggagatactggacatcactccttgttcgtttgggggcgtctcggtcatcacacccgggactaatactagtaatcaggtagcagttttatatcaaggcgtcaactgtaccgaagtacctgtggccatacacgctgatcagctaacgccaacatggcgagtctattccaccggctctaacgtttttcagaccagggctgggtgcctgataggggcagagcacgtcaataattcctatgagtgtgatatccccataggtgcggggatctgtgccagctatcaaacccaaaccaattcaccagggagcgcaagctctgtggcttctcagagcataattgcatatacaatgtcactgggcgttgagaatagcgttgcatactctaataacagcatagccattcccacgaactttactatcagtgtgacaaccgaaatattgccagtttcgatgaccaaaactagcgtggattgcacgatgtacatctgtggagactctaccgaatgcagcaatctgctattacaatatggcagcttctgtacacagttaaatcgagccttgacaggcatcgcagtggaacaggacaaaaatactcaagaggtgtttgcacaggtgaagcaaatctacaaaacgccccccattaaagattttggcgggttcaatttttcacaaattctccccgacccgtctaagccgagtaagcggtccttcatcgaagatctgctctttaacaaagtaaccctcgccgatgccggctttattaagcagtatggcgactgcctgggggatatagccgctcgtgacctgatttgcgcccagaagttcaatggtctgaccgtgttgcctcctttattgaccgatgaaatgattgcccagtacactagtgccctgctggccggcactatcacgtctgggtggaccttcggagctggtgccgccttgcagataccttttgcaatgcagatggcctataggtttaatggtatcggagtgactcagaacgtactgtacgagaaccagaagctcatcgctaatcaatttaactccgctatcggaaaaatccaggacagcctctcttctacagctagcgctctgggcaaactgcaggatgtcgttaatcagaatgcccaggccctgaacaccttggttaaacaactatcttccaacttcggggccatatccagtgtgttgaatgatattctctcccgcttggatccacctgaagctgaggtgcagatcgatcgcttgatcaccggcagactgcagtccctccagacatatgtaactcagcagctgattagagccgccgagataagggcaagtgcgaatctggctgccaccaagatgagcgaatgtgtattgggccagagcaaacgagttgatttttgcggtaaggggtatcatttaatgtctttccctcaatccgcacctcatggcgtagttttcctgcatgtgacttatgtcccggctcaggagaagaattttaccacagcccccgcgatctgccatgacggaaaggcccacttcccccgggaaggcgtgtttgtatccaatgggactcactggtttgtcactcagcgaaatttttatgaaccacagatcatcaccactgacaacacatttgttagtggaaactgcgatgtggtcatcggcatcgtgaataacactgtctatgatccactgcaacctgaactggattcttttaaagaggaactcgacaagtattttaaaaaccacactagccctgacgtggatctcggtgacatttctggcatcaacgctagcgtagtgaacattcagaaagagatagatagacttaatgaggtggccaagaacctcaacgaaagtctgatcgacctccaggaactggggaaatacgagcagtacattaaatggccttggtacatatggctggggttcattgctgggctgatcgcaatagtgatggtgaccataatgctctgttgcatgactagctgctgcagctgcctgaagggctgctgtagttgtgggtcatgttgtaagtttgacgaagatgatagcgagcctgtccttaaaggagtgaagctccactacacctagtaattcgaacggccgtatcacgcccaaacatttacagccgcggtgtcaaaaaccgcgtggacgtggttaacatccctgctgggaggatcagccgtaattattataattggcttggtgctggctactattgtggccatgtacgtgctgaccaaccagaaacataattgaatacagcagcaattggcaagctgcttacatagaactcgcggcgattggcatgccgccttaaaatttttattttattttttcttttcttttccgaatcggattttgtttttaatatttcaaaaaaaaaaaaaaaaaaaaaaaaaaaaaaaaaaaaaaaaaaaaaaaaaaaaaaaaaaaaaaaaaaaaaaaaaaaaaaaa

SEQ ID NO: 27983 - DNA, 13715 bp, synthetic construct
  source 1..13715: mol_type = other DNA
atgggcggcgcatgagagaagcccagaccaattacctacccaaaatggagaaagttcacgttgacatcgaggaagacagcccattcctcagagctttgcagcggagcttcccgcagtttgaggtagaagccaagcaggtcactgataatgaccatgctaatgccagagcgttttcgcatctggcttcaaaactgatcgaaacggaggtggacccatccgacacgatccttgacattggaagtgcgcccgcccgcagaatgtattctaagcacaagtatcattgtatctgtccgatgagatgtgcggaagatccggacagattgtataagtatgcaactaagctgaagaaaaactgtaaggaaataactgataaggaattggacaagaaaatgaaggagctcgccgccgtcatgagcgaccctgacctggaaactgagactatgtgcctccacgacgacgagtcgtgtcgctacgaagggcaagtcgctgtttaccaggatgtatacgcggttgacggaccgacaagtctctatcaccaagccaataagggagttagagtcgcctactggataggctttgacaccaccccttttatgtttaagaacttggctggagcatatccatcatactctaccaactgggccgacgaaaccgtgttaacggctcgtaacataggcctatgcagctctgacgttatggagcggtcacgtagagggatgtccattcttagaaagaagtatttgaaaccatccaacaatgttctattctctgttggctcgaccatctaccacgagaagagggacttactgaggagctggcacctgccgtctgtatttcacttacgtggcaagcaaaattacacatgtcggtgtgagactatagttagttgcgacgggtacgtcgttaaaagaatagctatcagtccaggcctgtatgggaagccttcaggctatgctgctacgatgcaccgcgagggattcttgtgctgcaaagtgacagacacattgaacggggagagggtctcttttcccgtgtgcacgtatgtgccagctacattgtgtgaccaaatgactggcatactggcaacagatgtcagtgcggacgacgcgcaaaaactgctggttgggctcaaccagcgtatagtcgtcaacggtcgcacccagagaaacaccaataccatgaaaaattaccttttgcccgtagtggcccaggcatttgctaggtgggcaaaggaatataaggaagatcaagaagatgaaaggccactaggactacgagatagacagttagtcatggggtgttgttgggcttttagaaggcacaagataacatctatttataagcgcccggatacccaaaccatcatcaaagtgaacagcgatttccactcattcgtgctgcccaggataggcagtaacacattggagatcgggctgagaacaagaatcaggaaaatgttagaggagcacaaggagccgtcacctctcattaccgccgaggacgtacaagaagctaagtgcgcagccgatgaggctaaggaggtgcgtgaagccgaggagttgcgcgcagctctaccacctttggcagctgatgttgaggagcccactctggaagccgatgtcgacttgatgttacaagaggctggggccggctcagtggagacacctcgtggcttgataaaggttaccagctacgctggcgaggacaagatcggctcttacgctgtgctttctccgcaggctgtactcaagagtgaaaaattatcttgcatccaccctctcgctgaacaagtcatagtgataacacactctggccgaaaagggcgttatgccgtggaaccataccatggtaaagtagtggtgccagagggacatgcaatacccgtccaggactttcaagctctgagtgaaagtgccaccattgtgtacaacgaacgtgagttcgtaaacaggtacctgcaccatattgccacacatggaggagcgctgaacactgatgaagaatattacaaaactgtcaagcccagcgagcacgacggcgaatacctgtacgacatcgacaggaaacagtgcgtcaagaaagaactagtcactgggctagggctcacaggcgagctggtggatcctcccttccatgaattcgcctacgagagtctgagaacacgaccagccgctccttaccaagtaccaaccataggggtgtatggcgtgccaggatcaggcaagtctggcatcattaaaagcgcagtcaccaaaaaagatctagtggtgagcgccaagaaagaaaactgtgcagaaattataagggacgtcaagaaaatgaaagggctggacgtcaatgccagaactgtggactcagtgctcttgaatggatgcaaacaccccgtagagaccctgtatattgacgaagcttttgcttgtcatgcaggtactctcagagcgctcatagccattataagacctaaaaaggcagtgctctgcggggatcccaaacagtgcggtttttttaacatgatgtgcctgaaagtgcattttaaccacgagatttgcacacaagtcttccacaaaagcatctctcgccgttgcactaaatctgtgacttcggtcgtctcaaccttgttttacgacaaaaaaatgagaacgacgaatccgaaagagactaagattgtgattgacactaccggcagtaccaaacctaagcaggacgatctcattctcacttgtttcagagggtgggtgaagcagttgcaaatagattacaaaggcaacgaaataatgacggcagctgcctctcaagggctgacccgtaaaggtgtgtatgccgttcggtacaaggtgaatgaaaatcctctgtacgcacccacctcagaacatgtgaacgtcctactgacccgcacggaggaccgcatcgtgtggaaaacactagccggcgacccatggataaaaacactgactgccaagtaccctgggaatttcactgccacgatagaggagtggcaagcagagcatgatgccatcatgaggcacatcttggagagaccggaccctaccgacgtcttccagaataaggcaaacgtgtgttgggccaaggctttagtgccggtgctgaagaccgctggcatagacatgaccactgaacaatggaacactgtggattattttgaaacggacaaagctcactcagcagagatagtattgaaccaactatgcgtgaggttctttggactcgatctggactccggtctattttctgcacccactgttccgttatccattaggaataatcactgggataactccccgtcgcctaacatgtacgggctgaataaagaagtggtccgtcagctctctcgcaggtacccacaactgcctcgggcagttgccactggaagagtctatgacatgaacactggtacactgcgcaattatgatccgcgcataaacctagtacctgtaaacagaagactgcctcatgctttagtcctccaccataatgaacacccacagagtgacttttcttcattcgtcagcaaattgaagggcagaactgtcctggtggtcggggaaaagttgtccgtcccaggcaaaatggttgactggttgtcagaccggcctgaggctaccttcagagctcggctggatttaggcatcccaggtgatgtgcccaaatatgacataatatttgttaatgtgaggaccccatataaataccatcactatcagcagtgtgaagaccatgccattaagcttagcatgttgaccaagaaagcttgtctgcatctgaatcccggcggaacctgtgtcagcataggttatggttacgctgacagggccagcgaaagcatcattggtgctatagcgcggcagttcaagttttcccgggtatgcaaaccgaaatcctcacttgaagagacggaagttctgtttgtattcattgggtacgatcgcaaggcccgtacgcacaatccttacaagctttcatcaaccttgaccaacatttatacaggttccagactccacgaagccggatgtgcaccctcatatcatgtggtgcgaggggatattgccacggccaccgaaggagtgattataaatgctgctaacagcaaaggacaacctggcggaggggtgtgcggagcgctgtataagaaattcccggaaagcttcgatttacagccgatcgaagtaggaaaagcgcgactggtcaaaggtgcagctaaacatatcattcatgccgtaggaccaaacttcaacaaagtttcggaggttgaaggtgacaaacagttggcagaggcttatgagtccatcgctaagattgtcaacgataacaattacaagtcagtagcgattccactgttgtccaccggcatcttttccgggaacaaagatcgactaacccaatcattgaaccatttgctgacagctttagacaccactgatgcagatgtagccatatactgcagggacaagaaatgggaaatgactctcaaggaagcagtggctaggagagaagcagtggaggagatatgcatatccgacgactcttcagtgacagaacctgatgcagagctggtgagggtgcatccgaagagttctttggctggaaggaagggctacagcacaagcgatggcaaaactttctcatatttggaagggaccaagtttcaccaggcggccaaggatatagcagaaattaatgccatgtggcccgttgcaacggaggccaatgagcaggtatgcatgtatatcctcggagaaagcatgagcagtattaggtcgaaatgccccgtcgaagagtcggaagcctccacaccacctagcacgctgccttgcttgtgcatccatgccatgactccagaaagagtacagcgcctaaaagcctcacgtccagaacaaattactgtgtgctcatcctttccattgccgaagtatagaatcactggtgtgcagaagatccaatgctcccagcctatattgttctcaccgaaagtgcctgcgtatattcatccaaggaagtatctcgtggaaacaccaccggtagacgagactccggagccatcggcagagaaccaatccacagaggggacacctgaacaaccaccacttataaccgaggatgagaccaggactagaacgcctgagccgatcatcatcgaagaggaagaagaggatagcataagtttgctgtcagatggcccgacccaccaggtgctgcaagtcgaggcagacattcacgggccgccctctgtatctagctcatcctggtccattcctcatgcatccgactttgatgtggacagtttatccatacttgacaccctggagggagctagcgtgaccagcggggcaacgtcagccgagactaactcttacttcgcaaagagtatggagtttctggcgcgaccggtgcctgcgcctcgaacagtattcaggaaccctccacatcccgctccgcgcacaagaacaccgtcacttgcacccagcagggcctgctcgagaaccagcctagtttccaccccgccaggcgtgaatagggtgatcactagagaggagctcgaggcgcttaccccgtcacgcactcctagcaggtcggtctcgagaaccagcctggtctccaacccgccaggcgtaaatagggtgattacaagagaggagtttgaggcgttcgtagcacaacaacaatgacggtttgatgcgggtgcatacatcttttcctccgacaccggtcaagggcatttacaacaaaaatcagtaaggcaaacggtgctatccgaagtggtgttggagaggaccgaattggagatttcgtatgccccgcgcctcgaccaagaaaaagaagaattactacgcaagaaattacagttaaatcccacacctgctaacagaagcagataccagtccaggaaggtggagaacatgaaagccataacagctagacgtattctgcaaggcctagggcattatttgaaggcagaaggaaaagtggagtgctaccgaaccctgcatcctgttcctttgtattcatctagtgtgaaccgtgccttttcaagccccaaggtcgcagtggaagcctgtaacgccatgttgaaagagaactttccgactgtggcttcttactgtattattccagagtacgatgcctatttggacatggttgacggagcttcatgctgcttagacactgccagtttttgccctgcaaagctgcgcagctttccaaagaaacactcctatttggaacccacaatacgatcggcagtgccttcagcgatccagaacacgctccagaacgtcctggcagctgccacaaaaagaaattgcaatgtcacgcaaatgagagaattgcccgtattggattcggcggcctttaatgtggaatgcttcaagaaatatgcgtgtaataatgaatattgggaaacgtttaaagaaaaccccatcaggcttactgaagaaaacgtggtaaattacattaccaaattaaaaggaccaaaagctgctgctctttttgcgaagacacataatttgaatatgttgcaggacataccaatggacaggtttgtaatggacttaaagagagacgtgaaagtgactccaggaacaaaacatactgaagaacggcccaaggtacaggtgatccaggctgccgatccgctagcaacagcgtatctgtgcggaatccaccgagagctggttaggagattaaatgcggtcctgcttccgaacattcatacactgtttgatatgtcggctgaagactttgacgctattatagccgagcacttccagcctggggattgtgttctggaaactgacatcgcgtcgtttgataaaagtgaggacgacgccatggctctgaccgcgttaatgattctggaagacttaggtgtggacgcagagctgttgacgctgattgaggcggctttcggcgaaatttcatcaatacatttgcccactaaaactaaatttaaattcggagccatgatgaaatctggaatgttcctcacactgtttgtgaacacagtcattaacattgtaatcgcaagcagagtgttgagagaacggctaaccggatcaccatgtgcagcattcattggagatgacaatatcgtgaaaggagtcaaatcggacaaattaatggcagacaggtgcgccacctggttgaatatggaagtcaagattatagatgctgtggtgggcgagaaagcgccttatttctgtggagggtttattttgtgtgactccgtgaccggcacagcgtgccgtgtggcagaccccctaaaaaggctgtttaagcttggcaaacctctggcagcagacgatgaacatgatgatgacaggagaagggcattgcatgaagagtcaacacgctggaaccgagtgggtattctttcagagctgtgcaaggcagtagaatcaaggtatgaaaccgtaggaacttccatcatagttatggccatgactactctagctagcagtgttaaatcattcagctacctgagaggggcccctataactctctacggctaacctgaatggactacgactctagaatagtctttaattaagccaccatggctggcgaggcccccttcctttacctgtacgcccttgtgtatttcctgcagagcatcaattttgtgagaatcatcatgaggctgtggctttgctggaaatgtaggagcaagaaccccctgttgtatgacgccaactactttctgtgttggcacaccaatctcgccgtgttccagagtgcctctaagatcattacactgaaaaagcggtggcagcttgcactttctaagggagtgcatttcgtttgcaacctgctcctggtgacactcaagcagggggaaatcaaagacgccacccctagcgacttcgttagagccactgccacaatcccaatccaggcttccctgcctttcggctggcttatcgtgggtgtggcactgttggctgtgcggagaccacagggactgcctaataatacagctagctggtttaccgctctgacacagcatggcaaagaagacctcaagttccctcgcggtcagggggtgcctattaacactaatagctctccagacgaccaaattgggtattacaggcgcgccacaagacggatcatggcctgcttagtggggctgatgtggctatcctattttattgctagctttcgcctgaagaaggacaagaagaagaaagctgatgagacccaggcactgccccagcgccaaaagaagcagcagacagtcacactgctccctgctgcagacctggatgacttcagcaagcagctgcaggggaactttggcgaccaggagctgattagacaggggactgactataagcattggcctcagattgctcagttcgccccaagtgcatccgccttcttcgggatgtcacgaataggaatggaagtgaccccttctgggacatggttgacatacaccggagcaatcaagattacctccggggacggtaccacgtctcctattagcgaacacgattatcagatagggggatatactgagaagtgggagtccggcgtcaaaaagatgagtgggaaaggccagcagcaacaaggccaaacagttactaaaaagtctgccgcagaagctagtaaaaagcctcgccagaagcggacagccaccaaagcttacaatgtgactcaggccttcggccgccgggggcctgaacagaccctcttgtggcccgttaccctcgcatgtttcgtgcttgcagctgtgtacaggatcaattggtttaaggatcaggttatcctgttgaacaaacatatagatgcctataagacattcccacccaccgagccaaagaaagataagaaaaagaaaactagtcctgcaaggatggccggcaatggaggagacgcagccttagccctgctcttactcgacaggctgaaccaacttgagtctaaaatgagcggtaaagggcagaagatgaaggatctgtccccaaggtggtatttctactatctgggcaccggccctgaggattgtgtcgtcctccactcatacttcactagcgattattaccagctgtatagtacacaattatctaccgacacaggcgtcgagcacgtgaccttctttatatacaataagatcgtggatgaaccagaggagcatgtgcagatccacactattgatggctctagcgggggcatcatctgggtggcaacagaaggagccctcaacaccccaaaggaccatatcggcaccaggaatccagccaacaatgccgccattgttctgcagctccctcagggcactactctccctaaaggcttctatgctgagggacccggaccaggcgccaaatttgttgctgcttggacactgaaagctgctgctgggcccggaccaggccagtacatcaaggccaactctaagtttatcggcatcaccgaattgggacctggacccggctagtgattgggcccctataactctctacggctaacctgaatggactacgacatagtctagtccgccaaggccaccatgtttgtcttcctggtcttgctgccgctggtgagcagccagtgcgtgaatctcaccacccgcacccagcttccacctgcctacactaacagcttcacccgaggggtgtattaccctgacaaggtattccggtcctccgtcctccatagcacgcaggacctttttctgcccttcttctcaaatgtgacatggttccatgccattcacgtgagcggcacgaatggaacgaagcgctttgataaccccgtgctgcctttcaatgacggcgtctacttcgcctccactgaaaagtcaaacatcatccggggctggatctttggcaccactcttgattcaaagacccagtcactgctgattgtgaacaatgctacaaacgtggttatcaaggtgtgtgagtttcagttctgtaacgatccatttttgggagtgtactaccacaagaacaacaagtcctggatggagtctgagttcagagtgtatagctctgctaacaactgcaccttcgagtacgtgtcccagcctttccttatggacctggaaggcaaacagggcaatttcaaaaacctgagagagttcgtgtttaagaacattgacggatacttcaaaatttattctaagcacacaccaattaacttagtgcgggacctaccccaaggctttagcgccctagagcccctggttgacctgcccattgggatcaatataacaaggttccaaactctactggctctgcatagaagttatctgaccccaggagacagctctagtggttggaccgccggcgcagcagcctactatgtcgggtacttacagccacgcacgttccttctgaagtacaatgagaacgggacaatcactgacgcagtagactgtgcactggacccgctaagcgagactaagtgcacacttaaatccttcacggtggagaaaggcatttatcagacctctaacttcagggtgcagccaacagaaagcattgtgcgattcccaaatattactaatctttgccctttcggggaggtctttaatgcaactagattcgcatcagtctatgcgtggaaccgcaaacgcatttccaattgtgtcgcagactactcagtgctgtacaactctgcctctttcagtacgttcaagtgttacggagtgtcacccactaaactgaacgacctgtgctttacaaatgtctacgctgactccttcgtgattaggggagacgaggtgagacaaattgcccccggacagactgggaagattgccgactacaattataagcttcctgatgatttcactggctgtgttattgcctggaatagtaacaatctggatagcaaggtgggaggcaactataactacttatatcgactgtttaggaagagtaatctgaaaccatttgagcgggatatttccacagaaatttaccaggccgggagcacaccatgtaatggggtggagggatttaattgttacttcccactccagagctatggtttccaacccaccaatggagtgggttaccagccctatagagtcgtggtgcttagttttgagctgcttcacgccccagcaaccgtctgcggtcccaaaaagtcgaccaatctcgtgaaaaacaaatgcgtaaacttcaactttaacggcttaacaggaaccggcgtgctcaccgaaagcaacaagaaattccttccatttcagcaattcggaagggacatcgccgacacaacagacgcggtgagggacccacagactctggagatactggacatcactccttgttcgtttgggggcgtctcggtcatcacacccgggactaatactagtaatcaggtagcagttttatatcaaggcgtcaactgtaccgaagtacctgtggccatacacgctgatcagctaacgccaacatggcgagtctattccaccggctctaacgtttttcagaccagggctgggtgcctgataggggcagagcacgtcaataattcctatgagtgtgatatccccataggtgcggggatctgtgccagctatcaaacccaaaccaattcaccagggagcgcaagctctgtggcttctcagagcataattgcatatacaatgtcactgggcgctgagaatagcgttgcatactctaataacagcatagccattcccacgaactttactatcagtgtgacaaccgaaatattgccagtttcgatgaccaaaactagcgtggattgcacgatgtacatctgtggagactctaccgaatgcagcaatctgctattacaatatggcagcttctgtacacagttaaatcgagccttgacaggcatcgcagtggaacaggacaaaaatactcaagaggtgtttgcacaggtgaagcaaatctacaaaacgccccccattaaagattttggcgggttcaatttttcacaaattctccccgacccgtctaagccgagtaagcggtccttcatcgaagatctgctctttaacaaagtaaccctcgccgatgccggctttattaagcagtatggcgactgcctgggggatatagccgctcgtgacctgatttgcgcccagaagttcaatggtctgaccgtgttgcctcctttattgaccgatgaaatgattgcccagtacactagtgccctgctggccggcactatcacgtctgggtggaccttcggagctggtgccgccttgcagataccttttgcaatgcagatggcctataggtttaatggtatcggagtgactcagaacgtactgtacgagaaccagaagctcatcgctaatcaatttaactccgctatcggaaaaatccaggacagcctctcttctacagctagcgctctgggcaaactgcaggatgtcgttaatcagaatgcccaggccctgaacaccttggttaaacaactatcttccaacttcggggccatatccagtgtgttgaatgatattctctcccgcttggatccacctgaagctgaggtgcagatcgatcgcttgatcaccggcagactgcagtccctccagacatatgtaactcagcagctgattagagccgccgagataagggcaagtgcgaatctggctgccaccaagatgagcgaatgtgtattgggccagagcaaacgagttgatttttgcggtaaggggtatcatttaatgtctttccctcaatccgcacctcatggcgtagttttcctgcatgtgacttatgtcccggctcaggagaagaattttaccacagcccccgcgatctgccatgacggaaaggcccacttcccccgggaaggcgtgtttgtatccaatgggactcactggtttgtcactcagcgaaatttttatgaaccacagatcatcaccactgacaacacatttgttagtggaaactgcgatgtggtcatcggcatcgtgaataacactgtctatgatccactgcaacctgaactggattcttttaaagaggaactcgacaagtattttaaaaaccacactagccctgacgtggatctcggtgacatttctggcatcaacgctagcgtagtgaacattcagaaagagatagatagacttaatgaggtggccaagaacctcaacgaaagtctgatcgacctccaggaactggggaaatacgagcagtacattaaatggccttggtacatatggctggggttcattgctgggctgatcgcaatagtgatggtgaccataatgctctgttgcatgactagctgctgcagctgcctgaagggctgctgtagttgtgggtcatgttgtaagtttgacgaagatgatagcgagcctgtccttaaaggagtgaagctccactacacctagtaacgaacggccgtatcacgcccaaacatttacagccgcggtgtcaaaaaccgcgtggacgtggttaacatccctgctgggaggatcagccgtaattattataattggcttggtgctggctactattgtggccatgtacgtgctgaccaaccagaaacataattgaatacagcagcaattggcaagctgcttacatagaactcgcggcgattggcatgccgccttaaaatttttattttattttttcttttcttttccgaatcggattttgtttttaatatttcaaaaaaaaaaaaaaaaaaaaaaaaaaaaaaaaaaaaaaaaaaaaaaaaaaaaaaaaaaaaaaaaaaaaaaaaaaaaaaaa
